(19) United States
(12) Patent Application Publication
(10) Pub. No.: US 2020/0055948 A1
(43) Pub. Date: Feb. 20, 2020

(54) CELLS EXPRESSING A BCMA-TARGETING CHIMERIC ANTIGEN RECEPTOR, AND COMBINATION THERAPY WITH A GAMMA SECRETASE INHIBITOR

(71) Applicants: Novartis AG, Basel (CH); The Trustees of the University of Pennsylvania, Philadelphia, PA (US)

(72) Inventors: Michael Daley, West Springfield, MA (US); Brian Granda, Salisbury, MA (US); Michael C. Milone, Cherry Hill, NJ (US); Selene Guadalupe Nunez Cruz, Philadelphia, PA (US)

(73) Assignees: Novartis AG, Basel (CH); The Trustees of the University of Pennsylvania, Philadelphia, PA (US)

(21) Appl. No.: 16/608,519

(22) PCT Filed: Apr. 27, 2018
(86) PCT No.: PCT/US2018/029963

§ 371 Date: Oct. 25, 2019

Related U.S. Application Data
(60) Provisional application No. 62/593,655, filed on Dec. 1, 2017.
(60) Provisional application No. 62/491,598, filed on Apr. 28, 2017.

(51) Int. Cl. C07K 16/28; A61K 35/17; A61K 39/395; A61K 31/55; A61K 31/381; A61K 31/4245; A61K 31/19; A61K 38/05; A61K 31/5513; A61K 31/417; C07K 16/40; C12N 15/113; A61P 35/00; A61K 45/06; C07K 14/725; A61K 38/17

(52) U.S. Cl. CPC C07K 16/2878; A61K 2039/507; A61K 39/3955; A61K 31/55; A61K 31/381; A61K 31/4245; A61K 31/19; A61K 38/05; A61K 31/5513; A61K 31/417; C07K 16/40; C12N 15/113; A61P 35/00; A61K 45/06; C07K 14/7051; A61K 38/1774; C07K 2317/76; C07K 2319/33; C07K 2319/30; C07K 2319/03; C07K 2319/02; C07K 2317/565; A61K 35/17

(57) ABSTRACT

The invention relates to the treatment of diseases associated with expression of BCMA, in particular myelomas. The invention relates to combination therapies of a BCMA CAR-expressing cell and a gamma secretase inhibitor.

### RELATED APPLICATIONS

[0001] This application claims priority to U.S. Ser. No. 62/491,598 filed Apr. 28, 2017, and U.S. Ser. No. 62/593,655 filed Dec. 1, 2017, the contents of each of which are incorporated herein by reference in their entirety.

### SEQUENCE LISTING

[0002] The instant application contains a Sequence Listing which has been submitted electronically in ASCII format and is hereby incorporated by reference in its entirety. Said ASCII copy, created on Apr. 23, 2018, is named N2067-7132WO_SL.txt and is 791,851 bytes in size.

### FIELD OF THE INVENTION

[0003] The present invention relates generally to the use of cells engineered to express a chimeric antigen receptor targeting B-cell maturation antigen protein (BCMA), optionally in combination with a gamma secretase inhibitor, to treat a disease associated with the expression of BCMA.

### BACKGROUND OF THE INVENTION

[0004] Gamma secretase is a multi-subunit protease complex that cleaves single-pass transmembrane proteins at residues within the transmembrane domain. The gamma secretase complex comprises four subunits: presenilin, nicastrin, gamma-secretase subunit aph-1, and gamma-secretase subunit PEN-2.

[0005] Another protein, CD147, has been reported as a non-essential regulator of the gamma secretase complex. Exemplary gamma secretase substrates include amyloid precursor protein, Notch, ErbB4, E-cadherin, N-cadherin, and CD44 (Haapasalo et al., J Alzheimers Dis. 2011; 25(1):3-28). Recently, B-cell maturation antigen (BCMA) was identified as another substrate of gamma secretase (Laurent et al., Nat Commun. 2015 Jun. 11; 6:7333).

[0006] BCMA is a tumor necrosis family receptor (TNFR) member expressed on cells of the B-cell lineage. BCMA expression is the highest on terminally differentiated B cells that assume the long lived plasma cell fate, including plasma cells, plasmablasts and a subpopulation of activated B cells and memory B cells. BCMA is involved in mediating the survival of plasma cells for maintaining long-term humoral immunity. The expression of BCMA has been recently linked to a number of cancers, autoimmune disorders, and infectious diseases. Cancers with increased expression of BCMA include some hematological cancers, such as multiple myeloma, Hodgkin's and non-Hodgkin's lymphoma, various leukemias, and glioblastoma.

[0007] Given the ongoing need for improved strategies for targeting diseases such as cancer, new compositions and methods for improving therapeutic agents that target BCMA, e.g., anti-BCMA chimeric antigen receptor (CAR) therapies, are highly desirable.

### SUMMARY OF THE INVENTION

[0008] The disclosure features, at least in part, a method of treating a disease or disorder associated with expression of B-cell maturation antigen (BCMA, also known as TNFRSF17, BCM, or CD269). In certain embodiments, the disorder is a cancer, e.g., a hematological cancer. In some embodiments, the method comprises administering to a subject a BCMA-targeting CAR therapy in combination with a gamma secretase inhibitor (GSI). In some embodiments, the BCMA-targeting CAR therapy is a cell (e.g., a population of cells) that expresses a CAR molecule that binds BCMA. In some embodiments, the combination maintains or has better clinical effectiveness as compared to either therapy alone. The disclosure additionally features a BCMA-targeting CAR therapy, e.g., as a monotherapy or in a combination therapy.

[0009] In one aspect, disclosed herein is a method of treating a subject having a disease associated with expression of B-cell maturation antigen (BCMA) comprising administering to the subject an effective amount of a cell (e.g., a population of cells) that expresses a chimeric antigen receptor (CAR) molecule that binds BCMA (a “BCMA CAR-expressing cell”), in combination with a gamma secretase inhibitor (GSI).

[0010] In certain embodiments, the GSI is an agent that reduces the expression and/or function of BCMA.

[0011] In one aspect, disclosed herein is a method of treating a subject having a disease associated with expression of B-cell maturation antigen (BCMA) comprising administering to the subject an effective amount of a cell (e.g., a population of cells) that expresses a chimeric antigen receptor (CAR) molecule that binds BCMA (a “BCMA CAR-expressing cell”), in combination with a gamma secretase inhibitor (GSI), wherein:

[0012] the CAR molecule comprises an anti-BCMA binding domain, a transmembrane domain, and an intracellular signaling domain, and wherein:

[0013] the GSI has one or more (e.g., 1, 2, 3, 4, 5, 6, 7, 8, 9, 10, 11, 12, or all) of the following properties:

[0014] (i) the GSI reduces gamma secretase-mediated cleavage of BCMA;

[0015] (ii) the GSI, when incubated with BCMA-expressing cells, increases cell surface expression of BCMA, e.g., by at least 2, 4, 6, 8, 10, 15, or 20-fold, e.g., as measured by a method described herein, e.g., a flow cytometry assay, e.g., as measured using methods described in Example 1 with respect to FIG. 1;

[0016] (iii) the GSI, when incubated with BCMA-expressing cells, changes conformation and/or posttranslational modification of the extracellular domain of cell surface-expressed BCMA;

[0017] (iv) the GSI, when incubated with BCMA-expressing cells, decreases the level of soluble BCMA in the cell supernatant, e.g., by at least 80, 85, 90, 95, 99, or 99.5%, e.g., as measured by a method described herein, e.g., an ELISA assay, e.g., as measured using methods described in Example 1 with respect to Table 28;

[0018] (v) the GSI, when administered in vivo, increases cell surface expression of BCMA, e.g., as measured by a method described herein, e.g., a flow cytometry assay;

[0019] (vi) the GSI, when administered in vivo, changes conformation and/or posttranslational modification of the extracellular domain of cell surface-expressed BCMA;

[0020] (vii) the GSI, when administered in vivo, decreases the level of soluble BCMA in the serum and/or bone marrow, e.g., as measured by a method described herein, e.g., an ELISA assay;

[0021] (viii) the GSI is capable of increasing the activity of the BCMA CAR-expressing cell, e.g., increasing the cytotoxicity of the BCMA CAR-expressing cell, e.g., as measured by a method described herein, e.g., as measured using methods described in Example 3 with respect to FIGS. 7B and 7C;

[0022] (ix) the GSI is capable of increasing the activity of the BCMA CAR-expressing cell, e.g., increasing the anti-tumor activity of the BCMA CAR-expressing cell, e.g., as measured by a method described herein, e.g., as measured using methods described in Example 3 with respect to FIG. 9D;

[0023] (x) the GSI does not reduce gamma secretase-mediated cleavage of Notch, or reduces gamma secretase-mediated cleavage of Notch less efficiently, e.g., at least 2-fold, 5-fold, 10-fold, 50-fold, or 100-fold less efficiently, than the GSI reduces gamma secretase-mediated cleavage of BCMA;

[0024] (xi) the GSI reduces gamma secretase-mediated cleavage of BCMA more efficiently, e.g., at least 2-fold, 5-fold, 10-fold, 50-fold, or 100-fold more efficiently, than the GSI reduces gamma secretase-mediated cleavage of another substrate of gamma secretase, e.g., Cadherins, ErbB, or CD44;

[0025] (xii) the GSI specifically binds to Presenilin-1, e.g., the GSI binds to Presenilin-1 with higher affinity, e.g., at least 2-fold, 5-fold, 10-fold, 50-fold, or 100-fold higher affinity, than the GSI binds to another subunit of gamma secretase, e.g., nicastrin, anterior pharynx-defective 1, or presenilin enhancer 2; or

[0026] (xiii) the GSI exhibits low gastrointestinal toxicity.

[0027] In one aspect, disclosed herein is a method of treating a subject having a disease associated with expression of B-cell maturation antigen (BCMA) comprising administering to the subject an effective amount of a cell (e.g., a population of cells) that expresses a chimeric antigen receptor (CAR) molecule that binds BCMA (a “BCMA CAR-expressing cell”), in combination with a gamma secretase inhibitor (GSI), wherein:

[0028] the CAR molecule comprises an anti-BCMA binding domain comprising:

[0029] a heavy chain variable region (VH) comprising a heavy chain complementarity determining region 1 (VHCDR1), a VHCDR2, and a VHCDR3 of any anti-BCMA heavy chain binding domain amino acid sequence listed in Tables 1, 20, 22, 24, and 26 (or a sequence at least about 85%, 90%, 95%, 99% or more identical thereto, and/or having one, two, three or more substitutions, insertions or deletions, e.g., conserved substitutions), and/or

[0030] a light chain variable region (VL) comprising a light chain complementarity determining region 1 (VLCDR1), a VLCDR2, and a VLCDR3 of any anti-BCMA light chain binding domain amino acid sequence listed in Tables 1, 21, 23, 25, and 26 (or a sequence at least about 85%, 90%, 95%, 99% or more identical thereto, and/or having one, two, three or more substitutions, insertions or deletions, e.g., conserved substitutions).

[0031] In one aspect, disclosed herein is a method of treating a subject having a disease associated with expression of B-cell maturation antigen (BCMA) comprising administering to the subject an effective amount of a cell (e.g., a population of cells) that expresses a chimeric antigen receptor (CAR) molecule that binds BCMA (a “BCMA CAR-expressing cell”), in combination with a gamma secretase inhibitor (GSI), wherein:

[0032] (i) the GSI is an antibody molecule that reduces the expression and/or function of gamma secretase, optionally wherein the GSI is an antibody molecule that specifically binds to a subunit of gamma secretase (e.g., presenilin, nicastrin, APH-1, or PEN-2);

[0033] (ii) the GSI is (1) a gene editing system targeted to one or more sites within a gene encoding a subunit of gamma secretase (e.g., presenilin, nicastrin, APH-1, or PEN-2) or a regulatory element thereof; (2) a nucleic acid encoding one or more components of the gene editing system; or (3) a combination thereof; or

[0034] (iii) the GSI is an agent that mediates RNA interference, e.g., an siRNA or shRNA specific for a gene encoding a subunit of gamma secretase (e.g., presenilin, nicastrin, APH-1, or PEN-2), or a nucleic acid encoding the siRNA or shRNA.

[0035] In one embodiment, the GSI has one or more (e.g., 1, 2, 3, 4, 5, 6, 7, 8, 9, 10, 11, 12, or all) of the following properties:

[0036] (i) the GSI reduces gamma secretase-mediated cleavage of BCMA or prevents BCMA from shedding;

[0037] (ii) the GSI, when incubated with BCMA-expressing cells, increases cell surface expression of BCMA, e.g., by at least 2, 4, 6, 8, 10, 15, or 20-fold, e.g., as measured by a method described herein, e.g., a flow cytometry assay, e.g., as measured using methods described in Example 1 with respect to FIG. 1;

[0038] (iii) the GSI, when incubated with BCMA-expressing cells, changes conformation and/or posttranslational modification of the extracellular domain of cell surface-expressed BCMA;

[0039] (iv) the GSI, when incubated with BCMA-expressing cells, decreases the level of soluble BCMA in the cell supernatant, e.g., by at least 80, 85, 90, 95, 99, or 99.5%, e.g., as measured by a method described herein, e.g., an ELISA assay, e.g., as measured using methods described in Example 1 with respect to Table 28;

[0040] (v) the GSI, when administered in vivo, increases cell surface expression of BCMA, e.g., as measured by a method described herein, e.g., a flow cytometry assay;

[0041] (vi) the GSI, when administered in vivo, changes conformation and/or posttranslational modification of the extracellular domain of cell surface-expressed BCMA;

[0042] (vii) the GSI, when administered in vivo, decreases the level of soluble BCMA in the serum and/or bone marrow, e.g., as measured by a method described herein, e.g., an ELISA assay;

[0043] (viii) the GSI is capable of increasing the activity of the BCMA CAR-expressing cell, e.g., increasing the cytotoxicity of the BCMA CAR-expressing cell, e.g., as measured by a method described herein, e.g., as measured using methods described in Example 3 with respect to FIGS. 7B and 7C;

[0044] (ix) the GSI is capable of increasing the activity of the BCMA CAR-expressing cell, e.g., increasing the anti-tumor activity of the BCMA CAR-expressing cell, e.g., as measured by a method described herein, e.g., as measured using methods described in Example 3 with respect to FIG. 9D;

[0045] (x) the GSI does not reduce gamma secretase-mediated cleavage of Notch, or reduces gamma secretase-mediated cleavage of Notch less efficiently, e.g., at least 2-fold, 5-fold, 10-fold, 50-fold, or 100-fold less efficiently, than the GSI reduces gamma secretase-mediated cleavage of BCMA;

[0046] (xi) the GSI reduces gamma secretase-mediated cleavage of BCMA more efficiently, e.g., at least 2-fold, 5-fold, 10-fold, 50-fold, or 100-fold more efficiently, than the GSI reduces gamma secretase-mediated cleavage of another substrate of gamma secretase, e.g., Cadherins, ErbB, or CD44;

[0047] (xii) the GSI specifically binds to Presenilin-1, e.g., the GSI binds to Presenilin-1 with higher affinity, e.g., at least 2-fold, 5-fold, 10-fold, 50-fold, or 100-fold higher affinity, than the GSI binds to another subunit of gamma secretase, e.g., nicastrin, anterior pharynx-defective 1, or presenilin enhancer 2; or

[0048] (xiii) the GSI exhibits low gastrointestinal toxicity.

[0049] In some embodiments, the GSI is chosen from a small molecule, an antibody molecule, an agent that mediates gene editing, or an agent that mediates RNA interference.

[0050] In one embodiment, the GSI is a small molecule that reduces the expression and/or function of gamma secretase, e.g., a small-molecule GSI disclosed herein. In one embodiment, the GSI is chosen from LY-450139, PF-5212362, BMS-708163, MK-0752, ELN-318463, BMS-299897, LY-411575, DAPT, BMS-906024, PF-3084014, RO4929097, or LY3039478. In one embodiment, the GSI is chosen from PF-5212362, ELN-318463, BMS-906024, or LY3039478. Exemplary GSIs are disclosed in Takebe et al., Pharmacol Ther. 2014 February; 141(2):140-9; and Ran et al., EMBO Mol Med. 2017 July; 9(7):950-966, both of which are incorporated herein by reference in their entirety.

[0051] In some embodiments, MK-0752 is administered in combination with docetaxel. In some embodiments, MK-0752 is administered in combination with gemcitabine. In some embodiments, BMS-906024 is administered in combination with chemotherapy.

[0052] In one embodiment, the GSI is:

[chemical structure]

or a pharmaceutically acceptable salt thereof.

[0053] In one embodiment, the GSI is:

[chemical structure]

or a pharmaceutically acceptable salt thereof.

[0054] In one embodiment, the GSI is:

[chemical structure]

or a pharmaceutically acceptable salt thereof.

[0055] In one embodiment, the GSI is

[chemical structure]

or a pharmaceutically acceptable salt thereof.

[0056] In one embodiment, the GSI is:

[chemical structure]

or a pharmaceutically acceptable salt thereof.

[0057] In one embodiment, the GSI is:

[chemical structure]

or a pharmaceutically acceptable salt thereof.

[0058] In one embodiment, the GSI is:

[chemical structure]

or a pharmaceutically acceptable salt thereof.

[0059] In one embodiment, the GSI is:

[chemical structure]

or a pharmaceutically acceptable salt thereof.

[0060] In one embodiment, the GSI is:

[chemical structure]

or a pharmaceutically acceptable salt thereof.

[0061] In one embodiment, the GSI is:

[chemical structure]

or a pharmaceutically acceptable salt thereof.

[0062] In one embodiment, the GSI is:

[chemical structure]

or a pharmaceutically acceptable salt thereof.

[0063] In one embodiment, the GSI is:

[chemical structure]

or a pharmaceutically acceptable salt thereof.

[0064] In one embodiment, the GSI is an antibody molecule that reduces the expression and/or function of gamma secretase, e.g., an antibody-molecule GSI disclosed herein. In one embodiment, the GSI is an antibody molecule that specifically binds to a subunit of gamma secretase (e.g., presenilin, nicastrin, APH-1, or PEN-2).

[0065] In one embodiment, the GSI is an agent that mediates gene editing, e.g., a gene editing system disclosed herein. In one embodiment, the GSI is (1) a gene editing system targeted to one or more sites within a gene encoding a subunit of gamma secretase (e.g., presenilin, nicastrin, APH-1, or PEN-2) or a regulatory element thereof; (2) a nucleic acid encoding one or more components of the gene editing system; or (3) a combination thereof. In one embodiment, the gene editing system is chosen from a CRISPR/Cas9 system, a zinc finger nuclease system, a TALEN system, or a meganuclease system.

[0066] In one embodiment, the GSI is an agent that mediates RNA interference, e.g., an siRNA or shRNA disclosed herein. In one embodiment, the GSI is an siRNA or shRNA specific for a gene encoding a subunit of gamma secretase (e.g., presenilin, nicastrin, APH-1, or PEN-2), or a nucleic acid encoding the siRNA or shRNA. In one embodiment, the siRNA or shRNA comprises a sequence complementary to a sequence of an mRNA of the gene encoding a subunit of gamma secretase (e.g., presenilin, nicastrin, APH-1, or PEN-2).

[0067] In one embodiment, the BCMA CAR-expressing cell comprises a nucleic acid encoding a CAR molecule, wherein the CAR molecule comprises an anti-BCMA binding domain, a transmembrane domain, and an intracellular signaling domain.

[0068] In one embodiment, the encoded anti-BCMA binding domain comprises:

[0069] a heavy chain variable region (VH) comprising a heavy chain complementarity determining region 1 (VHCDR1), a VHCDR2, and a VHCDR3 of any anti-BCMA heavy chain binding domain amino acid sequence listed in Tables 1, 16, 20, 22, 24, and 26 (or a sequence at least about 85%, 90%, 95%, 99% or more identical thereto, and/or having one, two, three or more substitutions, insertions or deletions, e.g., conserved substitutions), and/or

[0070] a light chain variable region (VL) comprising a light chain complementarity determining region 1 (VLCDR1), a VLCDR2, and a VLCDR3 of any anti-BCMA light chain binding domain amino acid sequence listed in Tables 1, 16, 21, 23, 25, and 26 (or a sequence at least about 85%, 90%, 95%, 99% or more identical thereto, and/or having one, two, three or more substitutions, insertions or deletions, e.g., conserved substitutions).

[0071] In one embodiment, the encoded anti-BCMA binding domain comprises:

[0072] a VH comprising a VH of any anti-BCMA heavy chain binding domain amino acid sequence listed in Tables 1, 16, and 26 (or a sequence at least about 85%, 90%, 95%, 99% or more identical thereto, and/or having one, two, three or more substitutions, insertions or deletions, e.g., conserved substitutions), and/or

[0073] a VL comprising a VL of any anti-BCMA light chain binding domain amino acid sequence listed in Tables 1, 16, and 26 (or a sequence at least about 85%, 90%, 95%, 99% or more identical thereto, and/or having one, two, three or more substitutions, insertions or deletions, e.g., conserved substitutions).

[0074] In one embodiment, the encoded anti-BCMA binding domain comprises an scFv comprising an scFv amino acid sequence listed in Tables 1 and 16 (or a sequence at least about 85%, 90%, 95%, 99% or more identical thereto, and/or having one, two, three or more substitutions, insertions or deletions, e.g., conserved substitutions).

[0075] In one embodiment, the encoded anti-BCMA binding domain comprises an scFv comprising a VH, a VL, and a linker, wherein the linker comprises the amino acid sequence of

(SEQ ID NO: 27)

GGGGSGGGGSGGGGSGGGGS.

[0076] In one embodiment, the encoded anti-BCMA binding domain comprises an amino acid sequence selected from the group consisting of SEQ ID NO: 39, SEQ ID NO: 40, SEQ ID NO: 41, SEQ ID NO: 42, SEQ ID NO: 43, SEQ ID NO: 44, SEQ ID NO: 45, SEQ ID NO: 46, SEQ ID NO: 47, SEQ ID NO: 48, SEQ ID NO: 49, SEQ ID NO: 50, SEQ ID NO: 51, SEQ ID NO: 52, SEQ ID NO: 53, SEQ ID NO: 129, SEQ ID NO: 130, SEQ ID NO: 131, SEQ ID NO: 132, SEQ ID NO: 133, SEQ ID NO: 134, SEQ ID NO: 135, SEQ ID NO: 136, SEQ ID NO: 137, SEQ ID NO: 138, SEQ ID NO: 139, SEQ ID NO: 140, SEQ ID NO: 141, SEQ ID NO: 142, SEQ ID NO: 143, SEQ ID NO: 144, SEQ ID NO: 145, SEQ ID NO: 146, SEQ ID NO: 147, SEQ ID NO: 148, and SEQ ID NO: 149, or a sequence with 95-99% identify thereof.

[0077] In one embodiment, the nucleic acid encoding the CAR molecule comprises a nucleotide sequence selected from the group consisting of SEQ ID NO: 54, SEQ ID NO: 55, SEQ ID NO: 56, SEQ ID NO: 57, SEQ ID NO: 58, SEQ ID NO: 59, SEQ ID NO: 60, SEQ ID NO: 61, SEQ ID NO: 62, SEQ ID NO: 63, SEQ ID NO: 64, SEQ ID NO: 65, SEQ ID NO: 66, SEQ ID NO: 67, SEQ ID NO: 68, SEQ ID NO: 150, SEQ ID NO: 151, SEQ ID NO: 152, SEQ ID NO: 153, SEQ ID NO: 154, SEQ ID NO: 155, SEQ ID NO: 156, SEQ ID NO: 157, SEQ ID NO: 158, SEQ ID NO: 159, SEQ ID NO: 160, SEQ ID NO: 161, SEQ ID NO: 162, SEQ ID NO: 163, SEQ ID NO: 164, SEQ ID NO: 165, SEQ ID NO: 166, SEQ ID NO: 167, SEQ ID NO: 168, SEQ ID NO: 169, SEQ ID NO: 170, or a sequence with 95-99% identify thereof.

[0078] In one embodiment, the encoded CAR molecule comprises a full CAR amino acid sequence listed in Tables 1 and 16 (or a sequence at least about 85%, 90%, 95%, 99% or more identical thereto, and/or having one, two, three or more substitutions, insertions or deletions, e.g., conserved substitutions).

[0079] In one embodiment, the encoded CAR molecule comprises an amino acid sequence selected from the group consisting of residues 22-483 of SEQ ID NO: 109, residues 22-490 of SEQ ID NO: 99, residues 22-488 of SEQ ID NO: 100, residues 22-487 of SEQ ID NO: 101, residues 22-493 of SEQ ID NO: 102, residues 22-490 of SEQ ID NO: 103, residues 22-491 of SEQ ID NO: 104, residues 22-482 of SEQ ID NO: 105, residues 22-483 of SEQ ID NO: 106, residues 22-485 of SEQ ID NO: 107, residues 22-483 of SEQ ID NO: 108, residues 22-490 of SEQ ID NO: 110, residues 22-483 of SEQ ID NO: 111, residues 22-484 of SEQ ID NO: 112, residues 22-485 of SEQ ID NO: 113, residues 22-487 of SEQ ID NO: 213, residues 23-489 of SEQ ID NO: 214, residues 22-490 of SEQ ID NO: 215, residues 22-484 of SEQ ID NO: 216, residues 22-485 of SEQ ID NO: 217, residues 22-489 of SEQ ID NO: 218, residues 22-497 of SEQ ID NO: 219, residues 22-492 of SEQ ID NO: 220, residues 22-490 of SEQ ID NO: 221, residues 22-485 of SEQ ID NO: 222, residues 22-492 of SEQ ID NO: 223, residues 22-492 of SEQ ID NO: 224, residues 22-483 of SEQ ID NO: 225, residues 22-490 of SEQ ID NO: 226, residues 22-485 of SEQ ID NO: 227, residues 22-486 of SEQ ID NO: 228, residues 22-492 of SEQ ID NO: 229, residues 22-488 of SEQ ID NO: 230, residues 22-488 of SEQ ID NO: 231, residues 22-495 of SEQ ID NO: 232, residues 22-490 of SEQ ID NO: 233, or a sequence with 95-99% identify thereof.

[0080] In one embodiment, the nucleic acid encoding the CAR molecule comprises a nucleotide sequence listed in Table 1, or a sequence with 95-99% identify thereof.

[0081] In one embodiment, the nucleic acid encoding the CAR molecule comprises a nucleotide sequence selected from the group consisting of SEQ ID NO: 114, SEQ ID NO: 115, SEQ ID NO: 116, SEQ ID NO: 117, SEQ ID NO: 118, SEQ ID NO: 119, SEQ ID NO: 120, SEQ ID NO: 121, SEQ ID NO: 122, SEQ ID NO: 123, SEQ ID NO: 124, SEQ ID NO: 125, SEQ ID NO: 126, SEQ ID NO: 127, SEQ ID NO: 128, SEQ ID NO: 234, SEQ ID NO: 235, SEQ ID NO: 236, SEQ ID NO: 237, SEQ ID NO: 238, SEQ ID NO: 239, SEQ ID NO: 240, SEQ ID NO: 241, SEQ ID NO: 242, SEQ ID NO: 243, SEQ ID NO: 244, SEQ ID NO: 245, SEQ ID NO: 246, SEQ ID NO: 247, SEQ ID NO: 248, SEQ ID NO: 249, SEQ ID NO: 250, SEQ ID NO: 251, SEQ ID NO: 252, SEQ ID NO: 253, and SEQ ID NO: 254, or a sequence with 95-99% identify thereof.

[0082] In one embodiment, the encoded transmembrane domain comprises a transmembrane domain of a protein selected from the group consisting of the alpha, beta or zeta chain of a T-cell receptor, CD28, CD3 epsilon, CD45, CD4, CD5, CD8, CD9, CD16, CD22, CD33, CD37, CD64, CD80, CD86, CD134, CD137 and CD154.

[0083] In one embodiment, the encoded transmembrane domain comprises the amino acid sequence of SEQ ID NO: 6 (or a sequence at least about 85%, 90%, 95%, 99% or more identical thereto, and/or having one, two, three or more substitutions, insertions or deletions, e.g., conserved substitutions).

[0084] In one embodiment, the nucleic acid encoding the CAR molecule comprises the nucleotide sequence of SEQ ID NO: 17, or a sequence with 95-99% identify thereof.

[0085] In one embodiment, the encoded anti-BCMA binding domain is connected to the transmembrane domain by a hinge region.

[0086] In one embodiment, the encoded hinge region comprises the amino acid sequence of SEQ ID NO: 2 or 36 (or a sequence at least about 85%, 90%, 95%, 99% or more identical thereto, and/or having one, two, three or more substitutions, insertions or deletions, e.g., conserved substitutions).

[0087] In one embodiment, the nucleic acid encoding the CAR molecule comprises the nucleotide sequence of SEQ ID NO: 13 or 37, or a sequence with 95-99% identify thereof.

[0088] In one embodiment, the encoded intracellular signaling domain is a functional signaling domain obtained from a protein chosen from an MHC class I molecule, a TNF receptor, an immunoglobulin-like protein, a cytokine receptor, integrin, signaling lymphocytic activation molecule (SLAM), an activating NK cell receptor, BTLA, a Toll ligand receptor, CD3, OX40, CD2, CD7, CD27, CD28, CD30, CD40, CDS, ICAM-1, LFA-1 (CD11a/CD18), 4-1BB (CD137), B7-H3, CDS, ICAM-1, ICOS (CD278), GITR, BAFFR, LIGHT, HVEM (LIGHTR), KIRDS2, SLAMF7, NKp80 (KLRF1), NKp44, NKp30, NKp46, CD19, CD4, CD8alpha, CD8beta, IL2R beta, IL2R gamma, IL7R alpha, ITGA4, VLA1, CD49a, ITGA4, IA4, CD49D, ITGA6, VLA-6, CD49f, ITGAD, CD11d, ITGAE, CD103, ITGAL, CD11a, LFA-1, ITGAM, CD11b, ITGAX, CD11c, ITGB1, CD29, ITGB2, CD18, LFA-1, ITGB7, NKG2D, NKG2C, TNFR2, TRANCE/RANKL, DNAM1 (CD226), SLAMF4 (CD244, 2B4), CD84, CD96 (Tactile), CEACAM1, CRTAM, Ly9 (CD229), CD160 (BY55), PSGL1, CD100 (SEMA4D), CD69, SLAMF6 (NTB-A, Ly108), SLAM (SLAMF1, CD150, IPO-3), BLAME (SLAMF8), SELPLG (CD162), LTBR, LAT, GADS, SLP-76, PAG/Cbp, CD19a, or a ligand that specifically binds with CD83.

[0089] In one embodiment, the encoded intracellular signaling domain is a functional signaling domain of a protein chosen from 4-1BB, CD3 zeta, CD28, or ICOS.

[0090] In one embodiment, the encoded intracellular signaling domain comprises a 4-1BB costimulatory domain (or a sequence at least about 85%, 90%, 95%, 99% or more identical thereto, and/or having one, two, three or more substitutions, insertions or deletions, e.g., conserved substitutions). In one embodiment, the encoded intracellular signaling domain comprises a CD28 costimulatory domain (or a sequence at least about 85%, 90%, 95%, 99% or more identical thereto, and/or having one, two, three or more substitutions, insertions or deletions, e.g., conserved substitutions). In one embodiment, the encoded intracellular signaling domain comprises an ICOS costimulatory domain (or a sequence at least about 85%, 90%, 95%, 99% or more identical thereto, and/or having one, two, three or more substitutions, insertions or deletions, e.g., conserved substitutions).

[0091] In one embodiment, the encoded intracellular signaling domain comprises a CD3-zeta stimulatory domain (or a sequence at least about 85%, 90%, 95%, 99% or more identical thereto, and/or having one, two, three or more substitutions, insertions or deletions, e.g., conserved substitutions).

[0092] In one embodiment, the encoded intracellular signaling domain comprises the amino acid sequence of SEQ ID NO: 7, 9, 10, 1104, or 1106 (or a sequence at least about 85%, 90%, 95%, 99% or more identical thereto, and/or having one, two, three or more substitutions, insertions or deletions, e.g., conserved substitutions).

[0093] In one embodiment, the nucleic acid molecule encoding the CAR molecule comprises the nucleotide sequence of SEQ ID NO: 18, 20, 21, 1105, or 1107, or a sequence with 95-99% identify thereof.

[0094] In one embodiment, the encoded intracellular signaling domain comprises the amino acid sequence of SEQ ID NO: 7 and the amino acid sequence of SEQ ID NO: 9 or 10, or an amino acid sequence at least about 85%, 90%, 95%, 99% or more identical to SEQ ID NO: 7 and an amino acid sequence at least about 85%, 90%, 95%, 99% or more identical to SEQ ID NO: 9 or 10.

[0095] In one embodiment, the nucleic acid encoding the CAR molecule comprises:

[0096] (i) a leader sequence encoding the amino acid sequence of SEQ ID NO: 1 (or a sequence at least about 85%, 90%, 95%, 99% or more identical thereto, and/or having one, two, three or more substitutions, insertions or deletions, e.g., conserved substitutions); or

[0097] (ii) the nucleotide sequence of SEQ ID NO: 12, or a sequence with 95-99% identify thereof.

[0098] In one embodiment, the nucleic acid encoding the CAR molecule is a DNA molecule, optionally wherein the DNA molecule is transcribed under an EF-1 promoter comprising the sequence of SEQ ID NO: 11.

[0099] In one embodiment, the nucleic acid encoding the CAR molecule is an RNA molecule.

[0100] In one embodiment, the cell is an autologous cell or an allogeneic cell.

[0101] In one embodiment, the cell is a T cell or a natural killer (NK) cell.

[0102] In one embodiment, the disease associated with expression of BCMA is:

[0103] (i) a cancer or malignancy, or a precancerous condition chosen from one or more of a myelodysplasia, a myelodysplastic syndrome or a preleukemia, or

[0104] (ii) a non-cancer related indication associated with expression of BCMA.

[0105] In one embodiment, the disease is chosen from acute leukemia, B-cell acute lymphoid leukemia (BALL), T-cell acute lymphoid leukemia (TALL), acute lymphoid leukemia (ALL), chronic myelogenous leukemia (CML), chronic lymphocytic leukemia (CLL), B cell prolymphocytic leukemia, blastic plasmacytoid dendritic cell neoplasm, Burkitt's lymphoma, diffuse large B cell lymphoma, follicular lymphoma, hairy cell leukemia, small cell- or large cell-follicular lymphoma, a malignant lymphoproliferative condition, mucosa associated lymphoid tissue (MALT) lymphoma, mantle cell lymphoma, marginal zone lymphoma, multiple myeloma, myelodysplasia and myelodysplastic syndrome, non-Hodgkin's lymphoma, plasmablastic lymphoma, plasmacytoid dendritic cell neoplasm, Waldenstrom macroglobulinemia, a plasma cell proliferative disorder (e.g., asymptomatic myeloma (smoldering multiple myeloma or indolent myeloma), monoclonal gammapathy of undetermined significance (MGUS), Waldenstrom's macroglobulinemia, plasmacytomas (e.g., plasma cell dyscrasia, solitary myeloma, solitary plasmacytoma, extramedullary plasmacytoma, and multiple plasmacytoma), systemic amyloid light chain amyloidosis, and POEMS syndrome (also known as Crow-Fukase syndrome, Takatsuki disease, and PEP syndrome)), prostate cancer (e.g., castrate-resistant or therapy-resistant prostate cancer, or metastatic prostate cancer), pancreatic cancer, or lung cancer.

[0106] In one embodiment, the disease is a hematologic cancer. In one embodiment, the disease is multiple myeloma. In one embodiment, the disease is CD19-negative multiple myeloma.

[0107] In one embodiment, the BCMA CAR-expressing cell and the GSI are administered simultaneously or sequentially. In one embodiment, the BCMA CAR-expressing cell is administered prior to the administration of the GSI. In one embodiment, the GSI is administered prior to the administration of the BCMA CAR-expressing cell. In one embodiment, the BCMA CAR-expressing cell and the GSI are administered simultaneously.

[0108] In one embodiment, the GSI is administered prior to the administration of the BCMA CAR-expressing cell (e.g., GSI is administered 1, 2, 3, 4, or 5 days prior to the administration of the BCMA CAR-expressing cell), optionally wherein after the administration of the GSI and prior to the administration of the BCMA CAR-expressing cell, the subject shows an increase in cell surface BCMA expression levels and/or a decrease in soluble BCMA levels.

[0109] In one embodiment, the method comprises a first treatment regimen and a second treatment regimen, wherein the first treatment regimen is performed prior to the second treatment regimen, wherein:

[0110] (i) the first treatment regimen comprises administering a first dose of the BCMA CAR-expressing cell, and

[0111] (ii) the second treatment regimen comprises administering a dose of GSI followed by a second dose of the BCMA CAR-expressing cell,

[0112] optionally wherein after the administration of the dose of GSI and prior to the administration of the second dose of the BCMA CAR-expressing cell, the subject shows an increase in cell surface BCMA expression levels and/or a decrease in soluble BCMA levels.

[0113] In some embodiments, the GSI is administered at a dose that does not reduce or does not substantially reduce T cell proliferation (e.g., reduces T cell proliferation by no more than 2, 4, 6, 8, 10, or 15%), e.g., as measured using a method described herein, e.g., as measured using methods described in Example 3 with respect to FIGS. 6A and 6B. In some embodiments, the GSI is administered at a sub-optimal dose. In some embodiments, the GSI is administered at a dose that is lower than the dose of GSI used when the GSI is administered as a monotherapy. In some embodiments, the GSI is administered at a dose that is lower than 100, 150, 200, 250, 300, 350, 400, 450, or 500 mg per day.

[0114] In one embodiment, the BCMA CAR-expressing cell and the GSI are administered in combination with a third therapeutic agent or procedure, optionally wherein the third therapeutic agent or procedure is chosen from one or more of chemotherapy, a targeted anti-cancer therapy, an oncolytic drug, a cytotoxic agent, an immune-based therapy, a cytokine, surgical procedure, a radiation procedure, an activator of a costimulatory molecule, an inhibitor of an inhibitory molecule (e.g., an inhibitor of a checkpoint inhibitor), a vaccine, or a cellular immunotherapy.

[0115] In one embodiment, the third therapeutic agent or procedure is chosen from:

[0116] (i) Dexamethasone;

[0117] (ii) a PD-1 inhibitor, optionally wherein the PD-1 inhibitor is selected from the group consisting of PDR001, Nivolumab, Pembrolizumab, Pidilizumab, MEDI0680, REGN2810, TSR-042, PF-06801591, and AMP-224;

[0118] (iii) a PD-L1 inhibitor, optionally wherein the PD-L1 inhibitor is selected from the group consisting of FAZ053, Atezolizumab, Avelumab, Durvalumab, and BMS-936559;

[0119] (iv) a CTLA-4 inhibitor, optionally wherein the CTLA-4 inhibitor is Ipilimumab or Tremelimumab;

[0120] (v) a TIM-3 inhibitor, optionally wherein the TIM-3 inhibitor is MGB453 or TSR-022;

[0121] (vi) a LAG-3 inhibitor, optionally wherein the LAG-3 inhibitor is selected from the group consisting of LAG525, BMS-986016, and TSR-033;

[0122] (vii) an mTOR inhibitor, optionally wherein the mTOR inhibitor is RAD001 or rapamycin; or

[0123] (viii) an agent chosen from HetIL-15, an anti-TGFβ antibody, an anti-CD47 antibody, an IDO inhibitor, a STING agonist, a TLR agonist, an immunomodulatory drug (IMiD) (e.g., Thalidomide, Lenalidomide, or Pomalidomide), a proteasome inhibitor (e.g., Bortezomib), or an ADCC-competent antibody (e.g., Daratumumab or Elotuzumab).

[0124] In one aspect, provided herein is a composition comprising a cell (e.g., a population of cells) that expresses a CAR molecule that binds BCMA (a “BCMA CAR-expressing cell”) and a GSI.

[0125] In one embodiment, the BCMA CAR-expressing cell and the GSI are present in a single dose form, or as two or more dose forms.

[0126] In one embodiment, provided herein is a composition comprising a cell (e.g., a population of cells) that expresses a CAR molecule that binds BCMA (a “BCMA CAR-expressing cell”) and a GSI for use as a medicament.

[0127] In one embodiment, provided herein is a composition comprising a cell (e.g., a population of cells) that expresses a CAR molecule that binds BCMA (a “BCMA CAR-expressing cell”) and a GSI for use in the treatment of a disease associated with expression of BCMA.

[0128] In one embodiment, provided herein is a composition comprising a cell (e.g., a population of cells) that expresses a CAR molecule that binds BCMA (a “BCMA CAR-expressing cell”) and a GSI, optionally wherein:

[0129] the CAR molecule comprises an anti-BCMA binding domain, a transmembrane domain, and an intracellular signaling domain, and optionally wherein:

[0130] the GSI has one or more (e.g., 1, 2, 3, 4, 5, 6, 7, 8, 9, 10, 11, 12, or all) of the following properties:

[0131] (i) the GSI reduces gamma secretase-mediated cleavage of BCMA;

[0132] (ii) the GSI, when incubated with BCMA-expressing cells, increases cell surface expression of BCMA, e.g., by at least 2, 4, 6, 8, 10, 15, or 20-fold, e.g., as measured by a method described herein, e.g., a flow cytometry assay, e.g., as measured using methods described in Example 1 with respect to FIG. 1;

[0133] (iii) the GSI, when incubated with BCMA-expressing cells, changes conformation and/or posttranslational modification of the extracellular domain of cell surface-expressed BCMA;

[0134] (iv) the GSI, when incubated with BCMA-expressing cells, decreases the level of soluble BCMA in the cell supernatant, e.g., by at least 80, 85, 90, 95, 99, or 99.5%, e.g., as measured by a method described herein, e.g., an ELISA assay, e.g., as measured using methods described in Example 1 with respect to Table 28;

[0135] (v) the GSI, when administered in vivo, increases cell surface expression of BCMA, e.g., as measured by a method described herein, e.g., a flow cytometry assay;

[0136] (vi) the GSI, when administered in vivo, changes conformation and/or posttranslational modification of the extracellular domain of cell surface-expressed BCMA;

[0137] (vii) the GSI, when administered in vivo, decreases the level of soluble BCMA in the serum and/or bone marrow, e.g., as measured by a method described herein, e.g., an ELISA assay;

[0138] (viii) the GSI is capable of increasing the activity of the BCMA CAR-expressing cell, e.g., increasing the cytotoxicity of the BCMA CAR-expressing cell, e.g., as measured by a method described herein, e.g., as measured using methods described in Example 3 with respect to FIGS. 7B and 7C;

[0139] (ix) the GSI is capable of increasing the activity of the BCMA CAR-expressing cell, e.g., increasing the anti-tumor activity of the BCMA CAR-expressing cell, e.g., as measured by a method described herein, e.g., as measured using methods described in Example 3 with respect to FIG. 9D;

[0140] (x) the GSI does not reduce gamma secretase-mediated cleavage of Notch, or reduces gamma secretase-mediated cleavage of Notch less efficiently, e.g., at least 2-fold, 5-fold, 10-fold, 50-fold, or 100-fold less efficiently, than the GSI reduces gamma secretase-mediated cleavage of BCMA;

[0141] (xi) the GSI reduces gamma secretase-mediated cleavage of BCMA more efficiently, e.g., at least 2-fold, 5-fold, 10-fold, 50-fold, or 100-fold more efficiently, than the GSI reduces gamma secretase-mediated cleavage of another substrate of gamma secretase, e.g., Cadherins, ErbB, or CD44;

[0142] (xii) the GSI specifically binds to Presenilin-1, e.g., the GSI binds to Presenilin-1 with higher affinity, e.g., at least 2-fold, 5-fold, 10-fold, 50-fold, or 100-fold higher affinity, than the GSI binds to another subunit of gamma secretase, e.g., nicastrin, anterior pharynx-defective 1, or presenilin enhancer 2; or

[0143] (xiii) the GSI exhibits low gastrointestinal toxicity.

[0144] In one aspect, provided herein is a kit comprising a cell (e.g., a population of cells) that expresses a CAR molecule that binds BCMA (a “BCMA CAR-expressing cell”) and a GSI.

[0145] In one aspect, provided herein is a kit comprising a cell (e.g., a population of cells) that expresses a CAR molecule that binds BCMA (a “BCMA CAR-expressing cell”) and a GSI, optionally wherein:

[0146] the CAR molecule comprises an anti-BCMA binding domain, a transmembrane domain, and an intracellular signaling domain, and optionally wherein:

[0147] the GSI has one or more (e.g., 1, 2, 3, 4, 5, 6, 7, 8, 9, 10, 11, 12, or all) of the following properties:

[0148] (i) the GSI reduces gamma secretase-mediated cleavage of BCMA;

[0149] (ii) the GSI, when incubated with BCMA-expressing cells, increases cell surface expression of BCMA, e.g., by at least 2, 4, 6, 8, 10, 15, or 20-fold, e.g., as measured by a method described herein, e.g., a flow cytometry assay, e.g., as measured using methods described in Example 1 with respect to FIG. 1;

[0150] (iii) the GSI, when incubated with BCMA-expressing cells, changes conformation and/or posttranslational modification of the extracellular domain of cell surface-expressed BCMA;

[0151] (iv) the GSI, when incubated with BCMA-expressing cells, decreases the level of soluble BCMA in the cell supernatant, e.g., by at least 80, 85, 90, 95, 99, or 99.5%, e.g., as measured by a method described herein, e.g., an ELISA assay, e.g., as measured using methods described in Example 1 with respect to Table 28;

[0152] (v) the GSI, when administered in vivo, increases cell surface expression of BCMA, e.g., as measured by a method described herein, e.g., a flow cytometry assay;

[0153] (vi) the GSI, when administered in vivo, changes conformation and/or posttranslational modification of the extracellular domain of cell surface-expressed BCMA;

[0154] (vii) the GSI, when administered in vivo, decreases the level of soluble BCMA in the serum and/or bone marrow, e.g., as measured by a method described herein, e.g., an ELISA assay;

[0155] (viii) the GSI is capable of increasing the activity of the BCMA CAR-expressing cell, e.g., increasing the cytotoxicity of the BCMA CAR-expressing cell, e.g., as measured by a method described herein, e.g., as measured using methods described in Example 3 with respect to FIGS. 7B and 7C;

[0156] (ix) the GSI is capable of increasing the activity of the BCMA CAR-expressing cell, e.g., increasing the anti-tumor activity of the BCMA CAR-expressing cell, e.g., as measured by a method described herein, e.g., as measured using methods described in Example 3 with respect to FIG. 9D;

[0157] (x) the GSI does not reduce gamma secretase-mediated cleavage of Notch, or reduces gamma secretase-mediated cleavage of Notch less efficiently, e.g., at least 2-fold, 5-fold, 10-fold, 50-fold, or 100-fold less efficiently, than the GSI reduces gamma secretase-mediated cleavage of BCMA;

[0158] (xi) the GSI reduces gamma secretase-mediated cleavage of BCMA more efficiently, e.g., at least 2-fold, 5-fold, 10-fold, 50-fold, or 100-fold more efficiently, than the GSI reduces gamma secretase-mediated cleavage of another substrate of gamma secretase, e.g., Cadherins, ErbB, or CD44;

[0159] (xii) the GSI specifically binds to Presenilin-1, e.g., the GSI binds to Presenilin-1 with higher affinity, e.g., at least 2-fold, 5-fold, 10-fold, 50-fold, or 100-fold higher affinity, than the GSI binds to another subunit of gamma secretase, e.g., nicastrin, anterior pharynx-defective 1, or presenilin enhancer 2; or

[0160] (xiii) the GSI exhibits low gastrointestinal toxicity.

[0161] The materials, methods, and examples are illustrative only and not intended to be limiting.

[0162] Headings, sub-headings or numbered or lettered elements, e.g., (a), (b), (i) etc, are presented merely for ease of reading. The use of headings or numbered or lettered elements in this document does not require the steps or elements be performed in alphabetical order or that the steps or elements are necessarily discrete from one another.

[0163] All publications, patent applications, patents, and other references mentioned herein are incorporated by reference in their entirety.

[0164] Other features, objects, and advantages of the invention will be apparent from the description and drawings, and from the claims.

### BRIEF DESCRIPTION OF THE DRAWINGS

[0165] FIG. 1 is a set of histogram plots showing the staining of BCMA-expressing human cancer cell lines, NCI-H929, MM1S, and U266B1, using a PE conjugated anti-BCMA antibody. The cell lines were untreated, or treated with 1.0 μM DAPT or 0.1 μM LY-411,575 before subjected to a flow cytometry analysis.

[0166] FIG. 2 is a panel of graphs showing the viability of BCMA-expressing cells (NCI-H929^{[High]}, MM1S^{[med]}, U266B1^{[low]}) following 72-hour treatment with various gamma secretase inhibitors.

[0167] FIG. 3 is a panel of graphs comparing soluble/shed BCMA (sBCMA) levels to membrane-bound BCMA (mBCMA) levels in MM1S cell cultures treated with various gamma secretase inhibitors for 72 hours.

[0168] FIG. 4A is a panel of histograms showing that a gamma secretase inhibitor increases the expression of BCMA on the surface of multiple myeloma cell lines. FIG. 4B is a panel of flow cytometry plots showing that a gamma secretase inhibitor increases BCMA expression on the surface of primary multiple myeloma samples.

[0169] FIGS. 5A and 5B are a pair of graphs showing that a gamma secretase inhibitor reduces soluble BCMA released by MM cell lines. In FIGS. 5A and 5B, the amount of soluble BCMA (pg/ml) as measured by ELISA is plotted for each GSI concentration tested.

[0170] FIGS. 6A and 6B are a pair of graphs showing that a gamma secretase inhibitor has minimal impact on T cell proliferation except at high concentrations. In FIGS. 6A and 6B, cellular volume (fL) and cell number (10⁶), respectively, are plotted against culture days for each GSI concentration tested.

[0171] FIGS. 7A-7C are a panel of graphs showing a gamma secretase inhibitor treatment enhances in vitro cytotoxicity of CART-BCMA cells towards MM cells. % lysis is plotted over different E:T ratios tested. Target cells were cultured in the presence (“BCMA3NP LY 10 μM”) or absence (“BCMA3NP”) of the gamma secretase inhibitor.

[0172] FIG. 8 shows a study design testing the combination of BCMA3NP CAR T cells with a gamma-secretase inhibitor.

[0173] FIGS. 9A-9D are a panel of graphs showing that a gamma secretase inhibitor treatment enhances in vivo BCMA CART activity. BLI is plotted over days post tumor injection for each condition tested.

### DETAILED DESCRIPTION

[0174] Membrane-bound BCMA is cleaved by gamma secretase. Without wishing to be bound by theory, BCMA shedding may create challenges for BCMA-targeting CAR therapies. Some of the challenges include the following. First, BCMA shedding may decrease surface BCMA expression on tumor cells, reducing target binding sites for BCMA-targeting CAR therapies. Second, BCMA shedding may generate a soluble BCMA sink that binds to BCMA-targeting CAR therapies. Third, soluble BCMA molecules may also sequester circulating BCMA ligands, e.g., B-cell activating factor (BAFF) and a proliferation-inducing ligand (APRIL), and prevent them from stimulating BCMA expressed on the surface of B cells and plasma cells, thereby leading to deficient humoral immune responses in patients.

[0175] Accordingly, the present invention provides, at least in part, a method of treating a subject having a disease associated with BCMA expression, comprising administering to the subject an effective amount of a cell (e.g., a population of cells) that expresses a CAR molecule that binds BCMA (a “BCMA CAR-expressing cell”) and a gamma secretase inhibitor (GSI). In one embodiment, the disease associated with expression of BCMA is a hematologic cancer, e.g., multiple myeloma. In one embodiment, the BCMA CAR-expressing cell and the GSI are administered simultaneously or sequentially. The present invention also provides a composition or kit comprising a BCMA CAR-expressing cell and a GSI.

[0176] As used herein, the term “BCMA” refers to B-cell maturation antigen. BCMA (also known as TNFRSF17, BCM or CD269) is a member of the tumor necrosis receptor (TNFR) family and is predominantly expressed on terminally differentiated B cells, e.g., memory B cells and plasma cells. Its ligands include B-cell activating factor (BAFF) and a proliferation-inducing ligand (APRIL). The protein BCMA is encoded by the gene TNFRSF17. Exemplary BCMA sequences are available at the Uniprot database under accession number Q02223.

[0177] As used herein, the term “BAFF” refers to B-cell activating factor, also known as Tumor necrosis factor ligand superfamily member 13B, B lymphocyte stimulator (BLyS), dendritic cell-derived TNF-like molecule, TNF- and APOL-related leukocyte expressed ligand 1 (TALL-1), and CD257. The protein BAFF is encoded by the gene TNFSF13B. Exemplary BAFF sequences are available at the Uniprot database under accession number Q9Y275.

[0178] As used herein, the term “APRIL” refers to a proliferation-inducing ligand, also known as Tumor necrosis factor ligand superfamily member 13, TNF- and APOL-related leukocyte expressed ligand 2 (TALL-2), TNF-related death ligand 1 (TRDL-1), and CD256. The protein APRIL is encoded by the gene TNFSF13. Exemplary APRIL sequences are available at the Uniprot database under accession number O75888.

[0179] As used herein, the term “gamma secretase” refers to any protein or protein complex that exhibits gamma secretase activities including binding to a substrate having a gamma secretase cleavage sequence, and catalyzing the cleavage of the gamma secretase cleavage sequence, at a gamma secretase cleavage site, to produce substrate cleavage products. In one embodiment, gamma secretase is a protein complex comprising one or more of the following subunits: presenilin, nicastrin, gamma-secretase subunit APH-1, and gamma-secretase subunit PEN-2.

[0180] As used herein, the term “gamma secretase inhibitor” or “GSI” refers to any molecule capable of inhibiting or reducing expression and/or function of gamma secretase. In certain embodiment, the GSI reduces expression and/or function of a subunit of gamma secretase (e.g., presenilin, nicastrin, APH-1, or PEN-2). Any form of a “gamma secretase inhibitor” such as a salt, a co-crystal, a crystalline form, a pro-drug, etc., is included within this term.

[0181] Additional terms are defined below and throughout the application.

[0182] The term “a” and “an” refers to one or to more than one (i.e., to at least one) of the grammatical object of the article. By way of example, “an element” means one element or more than one element.

[0183] The term “about” when referring to a measurable value such as an amount, a temporal duration, and the like, is meant to encompass variations of ±20% or in some instances ±10%, or in some instances ±5%, or in some instances ±1%, or in some instances ±0.1% from the specified value, as such variations are appropriate to perform the disclosed methods.

[0184] The term “Chimeric Antigen Receptor” or alternatively a “CAR” refers to a recombinant polypeptide construct comprising at least an extracellular antigen binding domain, a transmembrane domain and a cytoplasmic signaling domain (also referred to herein as “an intracellular signaling domain”) comprising a functional signaling domain derived from a stimulatory molecule as defined below. In some embodiments, the domains in the CAR polypeptide construct are in the same polypeptide chain, e.g., comprise a chimeric fusion protein. In some embodiments, the domains in the CAR polypeptide construct are not contiguous with each other, e.g., are in different polypeptide chains, e.g., as provided in an RCAR as described herein.

[0185] In one aspect, the stimulatory molecule of the CAR is the zeta chain associated with the T cell receptor complex. In one aspect, the cytoplasmic signaling domain comprises a primary signaling domain (e.g., a primary signaling domain of CD3-zeta). In one aspect, the cytoplasmic signaling domain further comprises one or more functional signaling domains derived from at least one costimulatory molecule as defined below. In one aspect, the costimulatory molecule is chosen from 4 1BB (i.e., CD137), CD27, ICOS, and/or CD28. In one aspect, the CAR comprises a chimeric fusion protein comprising an extracellular antigen recognition domain, a transmembrane domain and an intracellular signaling domain comprising a functional signaling domain derived from a stimulatory molecule. In one aspect, the CAR comprises a chimeric fusion protein comprising an extracellular antigen recognition domain, a transmembrane domain and an intracellular signaling domain comprising a functional signaling domain derived from a co-stimulatory molecule and a functional signaling domain derived from a stimulatory molecule. In one aspect, the CAR comprises a chimeric fusion protein comprising an extracellular antigen recognition domain, a transmembrane domain and an intracellular signaling domain comprising two functional signaling domains derived from one or more co-stimulatory molecule(s) and a functional signaling domain derived from a stimulatory molecule. In one aspect, the CAR comprises a chimeric fusion protein comprising an extracellular antigen recognition domain, a transmembrane domain and an intracellular signaling domain comprising at least two functional signaling domains derived from one or more co-stimulatory molecule(s) and a functional signaling domain derived from a stimulatory molecule. In one aspect the CAR comprises an optional leader sequence at the amino-terminus (N-ter) of the CAR fusion protein. In one aspect, the CAR further comprises a leader sequence at the N-terminus of the extracellular antigen recognition domain, wherein the leader sequence is optionally cleaved from the antigen recognition domain (e.g., an scFv) during cellular processing and localization of the CAR to the cellular membrane.

[0186] A CAR that comprises an antigen binding domain (e.g., an scFv, a single domain antibody, or TCR (e.g., a TCR alpha binding domain or TCR beta binding domain)) that targets a specific tumor marker X, wherein X can be a tumor marker as described herein, is also referred to as XCAR. For example, a CAR that comprises an antigen binding domain that targets BCMA is referred to as BCMACAR. The CAR can be expressed in any cell, e.g., an immune effector cell as described herein (e.g., a T cell or an NK cell).

[0187] The term “signaling domain” refers to the functional portion of a protein which acts by transmitting information within the cell to regulate cellular activity via defined signaling pathways by generating second messengers or functioning as effectors by responding to such messengers.

[0188] The term “antibody,” as used herein, refers to a protein, or polypeptide sequence derived from an immunoglobulin molecule, which specifically binds with an antigen. Antibodies can be polyclonal or monoclonal, multiple or single chain, or intact immunoglobulins, and may be derived from natural sources or from recombinant sources. Antibodies can be tetramers of immunoglobulin molecules.

[0189] The term “antibody fragment” refers to at least one portion of an intact antibody, or recombinant variants thereof, and refers to the antigen binding domain, e.g., an antigenic determining variable region of an intact antibody, that is sufficient to confer recognition and specific binding of the antibody fragment to a target, such as an antigen. Examples of antibody fragments include, but are not limited to, Fab, Fab′, F(ab′)2, and Fv fragments, scFv antibody fragments, linear antibodies, single domain antibodies such as sdAb (either VL or VH), camelid VHH domains, and multi-specific molecules formed from antibody fragments such as a bivalent fragment comprising two or more, e.g., two, Fab fragments linked by a disulfide brudge at the hinge region, or two or more, e.g., two isolated CDR or other epitope binding fragments of an antibody linked. An antibody fragment can also be incorporated into single domain antibodies, maxibodies, minibodies, nanobodies, intrabodies, diabodies, triabodies, tetrabodies, v-NAR and bis-scFv (see, e.g., Hollinger and Hudson, Nature Biotechnology 23:1126-1136, 2005). Antibody fragments can also be grafted into scaffolds based on polypeptides such as a fibronectin type III (Fn3) (see U.S. Pat. No. 6,703,199, which describes fibronectin polypeptide minibodies).

[0190] The term “scFv” refers to a fusion protein comprising at least one antibody fragment comprising a variable region of a light chain and at least one antibody fragment comprising a variable region of a heavy chain, wherein the light and heavy chain variable regions are contiguously linked via a short flexible polypeptide linker, and capable of being expressed as a single chain polypeptide, and wherein the scFv retains the specificity of the intact antibody from which it is derived. Unless specified, as used herein an scFv may have the VL and VH variable regions in either order, e.g., with respect to the N-terminal and C-terminal ends of the polypeptide, the scFv may comprise VL-linker-VH or may comprise VH-linker-VL.

[0191] The terms “complementarity determining region” or “CDR,” as used herein, refer to the sequences of amino acids within antibody variable regions which confer antigen specificity and binding affinity. For example, in general, there are three CDRs in each heavy chain variable region (e.g., HCDR1, HCDR2, and HCDR3) and three CDRs in each light chain variable region (LCDR1, LCDR2, and LCDR3). The precise amino acid sequence boundaries of a given CDR can be determined using any of a number of well-known schemes, including those described by Kabat et al. (1991), “Sequences of Proteins of Immunological Interest,” 5th Ed. Public Health Service, National Institutes of Health, Bethesda, Md. (“Kabat” numbering scheme), Al-Lazikani et al., (1997) JMB 273, 927-948 (“Chothia” numbering scheme), or a combination thereof. Under the Kabat numbering scheme, in some embodiments, the CDR amino acid residues in the heavy chain variable domain (VH) are numbered 31-35 (HCDR1), 50-65 (HCDR2), and 95-102 (HCDR3); and the CDR amino acid residues in the light chain variable domain (VL) are numbered 24-34 (LCDR1), 50-56 (LCDR2), and 89-97 (LCDR3). Under the Chothia numbering scheme, in some embodiments, the CDR amino acids in the VH are numbered 26-32 (HCDR1), 52-56 (HCDR2), and 95-102 (HCDR3); and the CDR amino acid residues in the VL are numbered 26-32 (LCDR1), 50-52 (LCDR2), and 91-96 (LCDR3). In a combined Kabat and Chothia numbering scheme, in some embodiments, the CDRs correspond to the amino acid residues that are part of a Kabat CDR, a Chothia CDR, or both. For instance, in some embodiments, the CDRs correspond to amino acid residues 26-35 (HCDR1), 50-65 (HCDR2), and 95-102 (HCDR3) in a VH, e.g., a mammalian VH, e.g., a human VH; and amino acid residues 24-34 (LCDR1), 50-56 (LCDR2), and 89-97 (LCDR3) in a VL, e.g., a mammalian VL, e.g., a human VL.

[0192] The portion of the CAR composition of the invention comprising an antibody or antibody fragment thereof may exist in a variety of forms, for example, where the antigen binding domain is expressed as part of a polypeptide chain including, for example, a single domain antibody fragment (sdAb), a single chain antibody (scFv), or e.g., a humanized antibody (Harlow et at, 1999, In: Using Antibodies: A Laboratory Manual, Cold Spring Harbor Laboratory Press, NY; Harlow et al., 1989, In: Antibodies: A Laboratory Manual, Cold Spring Harbor, N.Y.; Houston et al., 1988, Proc. Natl. Acad. Sci. USA 85:5879-5883; Bird et al., 1988, Science 242:423-426). In one aspect, the antigen binding domain of a CAR composition of the invention comprises an antibody fragment. In a further aspect, the CAR comprises an antibody fragment that comprises an scFv.

[0193] As used herein, the term “binding domain” or “antibody molecule” (also referred to herein as “anti-target (e.g., BCMA) binding domain”) refers to a protein, e.g., an immunoglobulin chain or fragment thereof, comprising at least one immunoglobulin variable domain sequence. The term “binding domain” or “antibody molecule” encompasses antibodies and antibody fragments. In an embodiment, an antibody molecule is a multispecific antibody molecule, e.g., it comprises a plurality of immunoglobulin variable domain sequences, wherein a first immunoglobulin variable domain sequence of the plurality has binding specificity for a first epitope and a second immunoglobulin variable domain sequence of the plurality has binding specificity for a second epitope. In an embodiment, a multispecific antibody molecule is a bispecific antibody molecule. A bispecific antibody has specificity for no more than two antigens. A bispecific antibody molecule is characterized by a first immunoglobulin variable domain sequence which has binding specificity for a first epitope and a second immunoglobulin variable domain sequence that has binding specificity for a second epitope. The term “antibody heavy chain,” refers to the larger of the two types of polypeptide chains present in antibody molecules in their naturally occurring conformations, and which normally determines the class to which the antibody belongs.

[0194] The term “antibody light chain,” refers to the smaller of the two types of polypeptide chains present in antibody molecules in their naturally occurring conformations. Kappa (κ) and lambda (λ) light chains refer to the two major antibody light chain isotypes.

[0195] The term “recombinant antibody” refers to an antibody which is generated using recombinant DNA technology, such as, for example, an antibody expressed by a bacteriophage or yeast expression system. The term should also be construed to mean an antibody which has been generated by the synthesis of a DNA molecule encoding the antibody and which DNA molecule expresses an antibody protein, or an amino acid sequence specifying the antibody, wherein the DNA or amino acid sequence has been obtained using recombinant DNA or amino acid sequence technology which is available and well known in the art.

[0196] The term “antigen” or “Ag” refers to a molecule that provokes an immune response. This immune response may involve either antibody production, or the activation of specific immunologically-competent cells, or both. The skilled artisan will understand that any macromolecule, including virtually all proteins or peptides, can serve as an antigen. Furthermore, antigens can be derived from recombinant or genomic DNA. A skilled artisan will understand that any DNA, which comprises a nucleotide sequences or a partial nucleotide sequence encoding a protein that elicits an immune response therefore encodes an “antigen” as that term is used herein. Furthermore, one skilled in the art will understand that an antigen need not be encoded solely by a full length nucleotide sequence of a gene. It is readily apparent that the present invention includes, but is not limited to, the use of partial nucleotide sequences of more than one gene and that these nucleotide sequences are arranged in various combinations to encode polypeptides that elicit the desired immune response. Moreover, a skilled artisan will understand that an antigen need not be encoded by a “gene” at all. It is readily apparent that an antigen can be generated synthesized or can be derived from a biological sample, or might be macromolecule besides a polypeptide. Such a biological sample can include, but is not limited to a tissue sample, a tumor sample, a cell or a fluid with other biological components.

[0197] The term “anti-tumor effect” refers to a biological effect which can be manifested by various means, including but not limited to, e.g., a decrease in tumor volume, a decrease in the number of tumor cells, a decrease in the number of metastases, an increase in life expectancy, decrease in tumor cell proliferation, decrease in tumor cell survival, or amelioration of various physiological symptoms associated with the cancerous condition. An “anti-tumor effect” can also be manifested by the ability of the peptides, polynucleotides, cells and antibodies of the invention in prevention of the occurrence of tumor in the first place.

[0198] The term “anti-cancer effect” refers to a biological effect which can be manifested by various means, including but not limited to, e.g., a decrease in tumor volume, a decrease in the number of cancer cells, a decrease in the number of metastases, an increase in life expectancy, decrease in cancer cell proliferation, decrease in cancer cell survival, or amelioration of various physiological symptoms associated with the cancerous condition. An “anti-cancer effect” can also be manifested by the ability of the peptides, polynucleotides, cells and antibodies in prevention of the occurrence of cancer in the first place. The term “anti-tumor effect” refers to a biological effect which can be manifested by various means, including but not limited to, e.g., a decrease in tumor volume, a decrease in the number of tumor cells, a decrease in tumor cell proliferation, or a decrease in tumor cell survival. The term “autologous” refers to any material derived from the same individual to whom it is later to be re-introduced into the individual.

[0199] The term “allogeneic” refers to any material derived from a different animal of the same species as the individual to whom the material is introduced. Two or more individuals are said to be allogeneic to one another when the genes at one or more loci are not identical. In some aspects, allogeneic material from individuals of the same species may be sufficiently unlike genetically to interact antigenically.

[0200] The term “xenogeneic” refers to a graft derived from an animal of a different species. The term “apheresis” as used herein refers to the art-recognized extracorporeal process by which the blood of a donor or patient is removed from the donor or patient and passed through an apparatus that separates out selected particular constituent(s) and returns the remainder to the circulation of the donor or patient, e.g., by retransfusion. Thus, in the context of “an apheresis sample” refers to a sample obtained using apheresis.

[0201] The term “combination” refers to either a fixed combination in one dosage unit form, or a combined administration where a compound of the present invention and a combination partner (e.g. another drug as explained below, also referred to as “therapeutic agent” or “co-agent”) may be administered independently at the same time or separately within time intervals, especially where these time intervals allow that the combination partners show a cooperative, e.g. synergistic effect. The single components may be packaged in a kit or separately. One or both of the components (e.g., powders or liquids) may be reconstituted or diluted to a desired dose prior to administration. The terms “co-administration” or “combined administration” or the like as utilized herein are meant to encompass administration of the selected combination partner to a single subject in need thereof (e.g. a patient), and are intended to include treatment regimens in which the agents are not necessarily administered by the same route of administration or at the same time. The term “pharmaceutical combination” as used herein means a product that results from the mixing or combining of more than one active ingredient and includes both fixed and non-fixed combinations of the active ingredients. The term “fixed combination” means that the active ingredients, e.g. a compound of the present invention and a combination partner, are both administered to a patient simultaneously in the form of a single entity or dosage. The term “non-fixed combination” means that the active ingredients, e.g. a compound of the present invention and a combination partner, are both administered to a patient as separate entities either simultaneously, concurrently or sequentially with no specific time limits, wherein such administration provides therapeutically effective levels of the two compounds in the body of the patient. The latter also applies to cocktail therapy, e.g. the administration of three or more active ingredients.

[0202] The term “cancer” refers to a disease characterized by the rapid and uncontrolled growth of aberrant cells. Cancer cells can spread locally or through the bloodstream and lymphatic system to other parts of the body. Examples of various cancers are described herein and include but are not limited to, breast cancer, prostate cancer, ovarian cancer, cervical cancer, skin cancer, pancreatic cancer, colorectal cancer, renal cancer, liver cancer, brain cancer, lymphoma, leukemia, lung cancer and the like. Preferred cancers treated by the methods described herein include multiple myeloma, Hodgkin's lymphoma or non-Hodgkin's lymphoma.

[0203] The terms “tumor” and “cancer” are used interchangeably herein, e.g., both terms encompass solid and liquid, e.g., diffuse or circulating, tumors. As used herein, the term “cancer” or “tumor” includes premalignant, as well as malignant cancers and tumors.

[0204] “Derived from” as that term is used herein, indicates a relationship between a first and a second molecule. It generally refers to structural similarity between the first molecule and a second molecule and does not connotate or include a process or source limitation on a first molecule that is derived from a second molecule. For example, in the case of an intracellular signaling domain that is derived from a CD3zeta molecule, the intracellular signaling domain retains sufficient CD3zeta structure such that is has the required function, namely, the ability to generate a signal under the appropriate conditions. It does not connotate or include a limitation to a particular process of producing the intracellular signaling domain, e.g., it does not mean that, to provide the intracellular signaling domain, one must start with a CD3zeta sequence and delete unwanted sequence, or impose mutations, to arrive at the intracellular signaling domain.

[0205] The phrase “disease associated with expression of BCMA” includes, but is not limited to, a disease associated with a cell which expresses BCMA (e.g., wild-type or mutant BCMA) or condition associated with a cell which expresses BCMA (e.g., wild-type or mutant BCMA) including, e.g., proliferative diseases such as a cancer or malignancy or a precancerous condition such as a myelodysplasia, a myelodysplastic syndrome or a preleukemia; or a noncancer related indication associated with a cell which expresses BCMA (e.g., wild-type or mutant BCMA). For the avoidance of doubt, a disease associated with expression of BCMA may include a condition associated with a cell which does not presently express BCMA, e.g., because BCMA expression has been downregulated, e.g., due to treatment with a molecule targeting BCMA, e.g., a BCMA inhibitor described herein, but which at one time expressed BCMA. In one aspect, a cancer associated with expression of BCMA (e.g., wild-type or mutant BCMA) is a hematological cancer. In one aspect, the hematological cancer is a leukemia or a lymphoma. In one aspect, a cancer associated with expression of BCMA (e.g., wild-type or mutant BCMA) is a malignancy of differentiated plasma B cells. In one aspect, a cancer associated with expression of BCMA(e.g., wild-type or mutant BCMA) includes cancers and malignancies including, but not limited to, e.g., one or more acute leukemias including but not limited to, e.g., B-cell acute Lymphoid Leukemia (“BALL”), T-cell acute Lymphoid Leukemia (“TALL”), acute lymphoid leukemia (ALL); one or more chronic leukemias including but not limited to, e.g., chronic myelogenous leukemia (CML), Chronic Lymphoid Leukemia (CLL). Additional cancers or hematologic conditions associated with expression of BMCA (e.g., wild-type or mutant BCMA) comprise, but are not limited to, e.g., B cell prolymphocytic leukemia, blastic plasmacytoid dendritic cell neoplasm, Burkitt's lymphoma, diffuse large B cell lymphoma, Follicular lymphoma, Hairy cell leukemia, small cell- or a large cell-follicular lymphoma, malignant lymphoproliferative conditions, MALT lymphoma, mantle cell lymphoma, Marginal zone lymphoma, multiple myeloma, myelodysplasia and myelodysplastic syndrome, non-Hodgkin's lymphoma, plasmablastic lymphoma, plasmacytoid dendritic cell neoplasm, Waldenstrom macroglobulinemia, and “preleukemia” which are a diverse collection of hematological conditions united by ineffective production (or dysplasia) of myeloid blood cells, and the like. In some embodiments, the cancer is multiple myeloma, Hodgkin's lymphoma, non-Hodgkin's lymphoma, or glioblastoma. In embodiments, a disease associated with expression of BCMA includes a plasma cell proliferative disorder, e.g., asymptomatic myeloma (smoldering multiple myeloma or indolent myeloma), monoclonal gammapathy of undetermined significance (MGUS), Waldenstrom's macroglobulinemia, plasmacytomas (e.g., plasma cell dyscrasia, solitary myeloma, solitary plasmacytoma, extramedullary plasmacytoma, and multiple plasmacytoma), systemic amyloid light chain amyloidosis, and POEMS syndrome (also known as Crow-Fukase syndrome, Takatsuki disease, and PEP syndrome). Further diseases associated with expression of BCMA (e.g., wild-type or mutant BCMA) expression include, but not limited to, e.g., atypical and/or non-classical cancers, malignancies, precancerous conditions or proliferative diseases associated with expression of BCMA (e.g., wild-type or mutant BCMA), e.g., a cancer described herein, e.g., a prostate cancer (e.g., castrate-resistant or therapy-resistant prostate cancer, or metastatic prostate cancer), pancreatic cancer, or lung cancer.

[0206] Non-cancer related conditions that are associated with BCMA (e.g., wild-type or mutant BCMA) include viral infections; e.g., HIV, fungal infections, e.g., C. neoformans; autoimmune disease; e.g. rheumatoid arthritis, system lupus erythematosus (SLE or lupus), pemphigus vulgaris, and Sjogren's syndrome; inflammatory bowel disease, ulcerative colitis; transplant-related allospecific immunity disorders related to mucosal immunity; and unwanted immune responses towards biologics (e.g., Factor VIII) where humoral immunity is important. In embodiments, a non-cancer related indication associated with expression of BCMA includes but is not limited to, e.g., autoimmune disease, (e.g., lupus), inflammatory disorders (allergy and asthma) and transplantation. In some embodiments, the tumor antigen-expressing cell expresses, or at any time expressed, mRNA encoding the tumor antigen. In an embodiment, the tumor antigen-expressing cell produces the tumor antigen protein (e.g., wild-type or mutant), and the tumor antigen protein may be present at normal levels or reduced levels. In an embodiment, the tumor antigen-expressing cell produced detectable levels of a tumor antigen protein at one point, and subsequently produced substantially no detectable tumor antigen protein.

[0207] The term “conservative sequence modifications” refers to amino acid modifications that do not significantly affect or alter the binding characteristics of the antibody or antibody fragment containing the amino acid sequence. Such conservative modifications include amino acid substitutions, additions and deletions. Modifications can be introduced into an antibody or antibody fragment of the invention by standard techniques known in the art, such as site-directed mutagenesis and PCR-mediated mutagenesis. Conservative substitutions are ones in which the amino acid residue is replaced with an amino acid residue having a similar side chain Families of amino acid residues having similar side chains have been defined in the art. These families include amino acids with basic side chains (e.g., lysine, arginine, histidine), acidic side chains (e.g., aspartic acid, glutamic acid), uncharged polar side chains (e.g., glycine, asparagine, glutamine, serine, threonine, tyrosine, cysteine, tryptophan), nonpolar side chains (e.g., alanine, valine, leucine, isoleucine, proline, phenylalanine, methionine), beta-branched side chains (e.g., threonine, valine, isoleucine) and aromatic side chains (e.g., tyrosine, phenylalanine, tryptophan, histidine). Thus, one or more amino acid residues within a CAR of the invention can be replaced with other amino acid residues from the same side chain family and the altered CAR can be tested using the functional assays described herein.

[0208] The term “stimulation,” refers to a primary response induced by binding of a stimulatory molecule (e.g., a TCR/CD3 complex) with its cognate ligand thereby mediating a signal transduction event, such as, but not limited to, signal transduction via the TCR/CD3 complex. Stimulation can mediate altered expression of certain molecules, such as downregulation of TGF-β, and/or reorganization of cytoskeletal structures, and the like.

[0209] The term “stimulatory molecule,” refers to a molecule expressed by a T cell that provides the primary cytoplasmic signaling sequence(s) that regulate primary activation of the TCR complex in a stimulatory way for at least some aspect of the T cell signaling pathway. In some embodiments, the ITAM-containing domain within the CAR recapitulates the signaling of the primary TCR independently of endogenous TCR complexes. In one aspect, the primary signal is initiated by, for instance, binding of a TCR/CD3 complex with an MHC molecule loaded with peptide, and which leads to mediation of a T cell response, including, but not limited to, proliferation, activation, differentiation, and the like. A primary cytoplasmic signaling sequence (also referred to as a “primary signaling domain”) that acts in a stimulatory manner may contain a signaling motif which is known as immunoreceptor tyrosine-based activation motif or ITAM. Examples of an ITAM containing primary cytoplasmic signaling sequence that is of particular use in the invention includes, but is not limited to, those derived from TCR zeta, FcR gamma, FcR beta, CD3 gamma, CD3 delta, CD3 epsilon, CD5, CD22, CD79a, CD79b, CD278 (also known as “ICOS”), FcεRI and CD66d, DAP10 and DAP12. In a specific CAR of the invention, the intracellular signaling domain in any one or more CARS of the invention comprises an intracellular signaling sequence, e.g., a primary signaling sequence of CD3-zeta. In a specific CAR of the invention, the primary signaling sequence of CD3-zeta is the sequence provided as SEQ ID NO:9, or the equivalent residues from a non-human species, e.g., mouse, rodent, monkey, ape and the like. In a specific CAR of the invention, the primary signaling sequence of CD3-zeta is the sequence as provided in SEQ ID NO:10, or the equivalent residues from a non-human species, e.g., mouse, rodent, monkey, ape and the like. The term “antigen presenting cell” or “APC” refers to an immune system cell such as an accessory cell (e.g., a B-cell, a dendritic cell, and the like) that displays a foreign antigen complexed with major histocompatibility complexes (MHC's) on its surface. T-cells may recognize these complexes using their T-cell receptors (TCRs). APCs process antigens and present them to T-cells.

[0210] An “intracellular signaling domain,” as the term is used herein, refers to an intracellular portion of a molecule. In embodiments, the intracellular signal domain transduces the effector function signal and directs the cell to perform a specialized function. While the entire intracellular signaling domain can be employed, in many cases it is not necessary to use the entire chain. To the extent that a truncated portion of the intracellular signaling domain is used, such truncated portion may be used in place of the intact chain as long as it transduces the effector function signal. The term intracellular signaling domain is thus meant to include any truncated portion of the intracellular signaling domain sufficient to transduce the effector function signal.

[0211] The intracellular signaling domain generates a signal that promotes an immune effector function of the CAR containing cell, e.g., a CART cell. Examples of immune effector function, e.g., in a CART cell, include cytolytic activity and helper activity, including the secretion of cytokines.

[0212] In an embodiment, the intracellular signaling domain can comprise a primary intracellular signaling domain. Exemplary primary intracellular signaling domains include those derived from the molecules responsible for primary stimulation, or antigen dependent simulation. In an embodiment, the intracellular signaling domain can comprise a costimulatory intracellular domain. Exemplary costimulatory intracellular signaling domains include those derived from molecules responsible for costimulatory signals, or antigen independent stimulation. For example, in the case of a CART, a primary intracellular signaling domain can comprise a cytoplasmic sequence of a T cell receptor, and a costimulatory intracellular signaling domain can comprise cytoplasmic sequence from co-receptor or costimulatory molecule.

[0213] A primary intracellular signaling domain can comprise a signaling motif which is known as an immunoreceptor tyrosine-based activation motif or ITAM. Examples of ITAM containing primary cytoplasmic signaling sequences include, but are not limited to, those derived from CD3 zeta, FcR gamma, FcR beta, CD3 gamma, CD3 delta, CD3 epsilon, CD5, CD22, CD79a, CD79b, CD278 (also known as “ICOS”), FcεRI, CD66d, DAP10 and DAP12.

[0214] The term “zeta” or alternatively “zeta chain”, “CD3-zeta” or “TCR-zeta” is defined as the protein provided as GenBan Acc. No. BAG36664.1, or the equivalent residues from a non-human species, e.g., mouse, rodent, monkey, ape and the like, and a “zeta stimulatory domain” or alternatively a “CD3-zeta stimulatory domain” or a “TCR-zeta stimulatory domain” is defined as the amino acid residues from the cytoplasmic domain of the zeta chain that are sufficient to functionally transmit an initial signal necessary for T cell activation. In one aspect the cytoplasmic domain of zeta comprises residues 52 through 164 of GenBank Acc. No. BAG36664.1 or the equivalent residues from a non-human species, e.g., mouse, rodent, monkey, ape and the like, that are functional orthologs thereof. In one aspect, the “zeta stimulatory domain” or a “CD3-zeta stimulatory domain” is the sequence provided as SEQ ID NO:9. In one aspect, the “zeta stimulatory domain” or a “CD3-zeta stimulatory domain” is the sequence provided as SEQ ID NO:10.

[0215] The term “costimulatory molecule” refers to the cognate binding partner on a T cell that specifically binds with a costimulatory ligand, thereby mediating a costimulatory response by the T cell, such as, but not limited to, proliferation. Costimulatory molecules are cell surface molecules other than antigen receptors or their ligands that are required for an efficient immune response. Costimulatory molecules include, but are not limited to an MHC class I molecule, TNF receptor proteins, Immunoglobulin-like proteins, cytokine receptors, integrins, signaling lymphocytic activation molecules (SLAM proteins), activating NK cell receptors, BTLA, Toll ligand receptor, OX40, CD2, CD7, CD27, CD28, CD30, CD40, CDS, ICAM-1, LFA-1 (CD11a/CD18), 4-1BB (CD137), B7-H3, CDS, ICAM-1, ICOS (CD278), GITR, BAFFR, LIGHT, HVEM (LIGHTR), KIRDS2, SLAMF7, NKp80 (KLRF1), NKp44, NKp30, NKp46, CD19, CD4, CD8alpha, CD8beta, IL2R beta, IL2R gamma, IL7R alpha, ITGA4, VLA1, CD49a, ITGA4, IA4, CD49D, ITGA6, VLA-6, CD49f, ITGAD, CD11d, ITGAE, CD103, ITGAL, CD11a, LFA-1, ITGAM, CD11b, ITGAX, CD11c, ITGB1, CD29, ITGB2, CD18, LFA-1, ITGB7, NKG2D, NKG2C, TNFR2, TRANCE/RANKL, DNAM1 (CD226), SLAMF4 (CD244, 2B4), CD84, CD96 (Tactile), CEACAM1, CRTAM, Ly9 (CD229), CD160 (BY55), PSGL1, CD100 (SEMA4D), CD69, SLAMF6 (NTB-A, Ly108), SLAM (SLAMF1, CD150, IPO-3), BLAME (SLAMF8), SELPLG (CD162), LTBR, LAT, GADS, SLP-76, PAG/Cbp, CD19a, and a ligand that specifically binds with CD83.

[0216] A costimulatory intracellular signaling domain refers to the intracellular portion of a costimulatory molecule.

[0217] The intracellular signaling domain can comprise the entire intracellular portion, or the entire native intracellular signaling domain, of the molecule from which it is derived, or a functional fragment thereof.

[0218] The term “4-1BB” refers to a member of the TNFR superfamily with an amino acid sequence provided as GenBank Acc. No. AAA62478.2, or the equivalent residues from a non-human species, e.g., mouse, rodent, monkey, ape and the like; and a “4-1BB costimulatory domain” is defined as amino acid residues 214-255 of GenBank Acc. No. AAA62478.2, or the equivalent residues from a non-human species, e.g., mouse, rodent, monkey, ape and the like. In one aspect, the “4-1BB costimulatory domain” is the sequence provided as SEQ ID NO:7 or the equivalent residues from a non-human species, e.g., mouse, rodent, monkey, ape and the like.

[0219] “Immune effector cell,” as that term is used herein, refers to a cell that is involved in an immune response, e.g., in the promotion of an immune effector response. Examples of immune effector cells include T cells, e.g., alpha/beta T cells and gamma/delta T cells, B cells, natural killer (NK) cells, natural killer T (NKT) cells, mast cells, and myeloic-derived phagocytes.

[0220] “Immune effector function or immune effector response,” as that term is used herein, refers to function or response, e.g., of an immune effector cell, that enhances or promotes an immune attack of a target cell. E.g., an immune effector function or response refers a property of a T or NK cell that promotes killing or the inhibition of growth or proliferation, of a target cell. In the case of a T cell, primary stimulation and co-stimulation are examples of immune effector function or response.

[0221] The term “effector function” refers to a specialized function of a cell. Effector function of a T cell, for example, may be cytolytic activity or helper activity including the secretion of cytokines.

[0222] The term “encoding” refers to the inherent property of specific sequences of nucleotides in a polynucleotide, such as a gene, a cDNA, or an mRNA, to serve as templates for synthesis of other polymers and macromolecules in biological processes having either a defined sequence of nucleotides (e.g., rRNA, tRNA and mRNA) or a defined sequence of amino acids and the biological properties resulting therefrom. Thus, a gene, cDNA, or RNA, encodes a protein if transcription and translation of mRNA corresponding to that gene produces the protein in a cell or other biological system. Both the coding strand, the nucleotide sequence of which is identical to the mRNA sequence and is usually provided in sequence listings, and the non-coding strand, used as the template for transcription of a gene or cDNA, can be referred to as encoding the protein or other product of that gene or cDNA.

[0223] Unless otherwise specified, a “nucleotide sequence encoding an amino acid sequence” includes all nucleotide sequences that are degenerate versions of each other and that encode the same amino acid sequence. The phrase nucleotide sequence that encodes a protein or a RNA may also include introns to the extent that the nucleotide sequence encoding the protein may in some version contain an intron(s).

[0224] The term “effective amount” or “therapeutically effective amount” are used interchangeably herein, and refer to an amount of a compound, formulation, material, or composition, as described herein effective to achieve a particular biological result.

[0225] The term “endogenous” refers to any material from or produced inside an organism, cell, tissue or system.

[0226] The term “exogenous” refers to any material introduced from or produced outside an organism, cell, tissue or system.

[0227] The term “expression” refers to the transcription and/or translation of a particular nucleotide sequence driven by a promoter.

[0228] The term “transfer vector” refers to a composition of matter which comprises an isolated nucleic acid and which can be used to deliver the isolated nucleic acid to the interior of a cell. Numerous vectors are known in the art including, but not limited to, linear polynucleotides, polynucleotides associated with ionic or amphiphilic compounds, plasmids, and viruses. Thus, the term “transfer vector” includes an autonomously replicating plasmid or a virus. The term should also be construed to further include non-plasmid and non-viral compounds which facilitate transfer of nucleic acid into cells, such as, for example, a polylysine compound, liposome, and the like. Examples of viral transfer vectors include, but are not limited to, adenoviral vectors, adeno-associated virus vectors, retroviral vectors, lentiviral vectors, and the like.

[0229] The term “expression vector” refers to a vector comprising a recombinant polynucleotide comprising expression control sequences operatively linked to a nucleotide sequence to be expressed. An expression vector comprises sufficient cis-acting elements for expression; other elements for expression can be supplied by the host cell or in an in vitro expression system. Expression vectors include all those known in the art, including cosmids, plasmids (e.g., naked or contained in liposomes) and viruses (e.g., lentiviruses, retroviruses, adenoviruses, and adeno-associated viruses) that incorporate the recombinant polynucleotide.

[0230] The term “lentivirus” refers to a genus of the Retroviridae family. Lentiviruses are unique among the retroviruses in being able to infect non-dividing cells; they can deliver a significant amount of genetic information into the DNA of the host cell, so they are one of the most efficient methods of a gene delivery vector. HIV, SIV, and FIV are all examples of lentiviruses.

[0231] The term “lentiviral vector” refers to a vector derived from at least a portion of a lentivirus genome, including especially a self-inactivating lentiviral vector as provided in Milone et al., Mol. Ther. 17(8): 1453-1464 (2009). Other examples of lentivirus vectors that may be used in the clinic, include but are not limited to, e.g., the LENTIVECTOR® gene delivery technology from Oxford BioMedica, the LENTIMAX™ vector system from Lentigen and the like. Nonclinical types of lentiviral vectors are also available and would be known to one skilled in the art.

[0232] The term “homologous” or “identity” refers to the subunit sequence identity between two polymeric molecules, e.g., between two nucleic acid molecules, such as, two DNA molecules or two RNA molecules, or between two polypeptide molecules. When a subunit position in both of the two molecules is occupied by the same monomeric subunit; e.g., if a position in each of two DNA molecules is occupied by adenine, then they are homologous or identical at that position. The homology between two sequences is a direct function of the number of matching or homologous positions; e.g., if half (e.g., five positions in a polymer ten subunits in length) of the positions in two sequences are homologous, the two sequences are 50% homologous; if 90% of the positions (e.g., 9 of 10), are matched or homologous, the two sequences are 90% homologous.

[0233] “Humanized” forms of non-human (e.g., murine) antibodies are chimeric immunoglobulins, immunoglobulin chains or fragments thereof (such as Fv, Fab, Fab′, F(ab′)2 or other antigen-binding subsequences of antibodies) which contain minimal sequence derived from non-human immunoglobulin. For the most part, humanized antibodies and antibody fragments thereof are human immunoglobulins (recipient antibody or antibody fragment) in which residues from a complementary-determining region (CDR) of the recipient are replaced by residues from a CDR of a non-human species (donor antibody) such as mouse, rat or rabbit having the desired specificity, affinity, and capacity. In some instances, Fv framework region (FR) residues of the human immunoglobulin are replaced by corresponding non-human residues. Furthermore, a humanized antibody/antibody fragment can comprise residues which are found neither in the recipient antibody nor in the imported CDR or framework sequences. These modifications can further refine and optimize antibody or antibody fragment performance. In general, the humanized antibody or antibody fragment thereof will comprise substantially all of at least one, and typically two, variable domains, in which all or substantially all of the CDR regions correspond to those of a non-human immunoglobulin and all or a significant portion of the FR regions are those of a human immunoglobulin sequence. The humanized antibody or antibody fragment can also comprise at least a portion of an immunoglobulin constant region (Fc), typically that of a human immunoglobulin. For further details, see Jones et al., Nature, 321: 522-525, 1986; Reichmann et al., Nature, 332: 323-329, 1988; Presta, Curr. Op. Struct. Biol., 2: 593-596, 1992.

[0234] “Fully human” refers to an immunoglobulin, such as an antibody or antibody fragment, where the whole molecule is of human origin or consists of an amino acid sequence identical to a human form of the antibody or immunoglobulin.

[0235] The term “isolated” means altered or removed from the natural state. For example, a nucleic acid or a peptide naturally present in a living animal is not “isolated,” but the same nucleic acid or peptide partially or completely separated from the coexisting materials of its natural state is “isolated.” An isolated nucleic acid or protein can exist in substantially purified form, or can exist in a non-native environment such as, for example, a host cell.

[0236] In the context of the present invention, the following abbreviations for the commonly occurring nucleic acid bases are used. “A” refers to adenosine, “C” refers to cytosine, “G” refers to guanosine, “T” refers to thymidine, and “U” refers to uridine.

[0237] The term “operably linked” or “transcriptional control” refers to functional linkage between a regulatory sequence and a heterologous nucleic acid sequence resulting in expression of the latter. For example, a first nucleic acid sequence is operably linked with a second nucleic acid sequence when the first nucleic acid sequence is placed in a functional relationship with the second nucleic acid sequence. For instance, a promoter is operably linked to a coding sequence if the promoter affects the transcription or expression of the coding sequence. Operably linked DNA sequences can be contiguous with each other and, e.g., where necessary to join two protein coding regions, are in the same reading frame.

[0238] The term “parenteral” administration of an immunogenic composition includes, e.g., subcutaneous (s.c.), intravenous (i.v.), intramuscular (i.m.), or intrasternal injection, intratumoral, or infusion techniques.

[0239] The term “nucleic acid” or “polynucleotide” refers to deoxyribonucleic acids (DNA) or ribonucleic acids (RNA) and polymers thereof in either single- or double-stranded form. Unless specifically limited, the term encompasses nucleic acids containing known analogues of natural nucleotides that have similar binding properties as the reference nucleic acid and are metabolized in a manner similar to naturally occurring nucleotides. Unless otherwise indicated, a particular nucleic acid sequence also implicitly encompasses conservatively modified variants thereof (e.g., degenerate codon substitutions, e.g., conservative substitutions), alleles, orthologs, SNPs, and complementary sequences as well as the sequence explicitly indicated. Specifically, degenerate codon substitutions, e.g., conservative substitutions may be achieved by generating sequences in which the third position of one or more selected (or all) codons is substituted with mixed-base and/or deoxyinosine residues (Batzer et al., Nucleic Acid Res. 19:5081 (1991); Ohtsuka et al., J. Biol. Chem. 260:2605-2608 (1985); and Rossolini et al., Mol. Cell. Probes 8:91-98 (1994)).

[0240] The terms “peptide,” “polypeptide,” and “protein” are used interchangeably, and refer to a compound comprised of amino acid residues covalently linked by peptide bonds. A protein or peptide must contain at least two amino acids, and no limitation is placed on the maximum number of amino acids that can comprise a protein's or peptide's sequence. Polypeptides include any peptide or protein comprising two or more amino acids joined to each other by peptide bonds. As used herein, the term refers to both short chains, which also commonly are referred to in the art as peptides, oligopeptides and oligomers, for example, and to longer chains, which generally are referred to in the art as proteins, of which there are many types. “Polypeptides” include, for example, biologically active fragments, substantially homologous polypeptides, oligopeptides, homodimers, heterodimers, variants of polypeptides, modified polypeptides, derivatives, analogs, fusion proteins, among others. A polypeptide includes a natural peptide, a recombinant peptide, or a combination thereof.

[0241] The term “promoter” refers to a DNA sequence recognized by the synthetic machinery of the cell, or introduced synthetic machinery, required to initiate the specific transcription of a polynucleotide sequence.

[0242] The term “promoter/regulatory sequence” refers to a nucleic acid sequence which is required for expression of a gene product operably linked to the promoter/regulatory sequence. In some instances, this sequence may be the core promoter sequence and in other instances, this sequence may also include an enhancer sequence and other regulatory elements which are required for expression of the gene product. The promoter/regulatory sequence may, for example, be one which expresses the gene product in a tissue specific manner.

[0243] The term “constitutive” promoter refers to a nucleotide sequence which, when operably linked with a polynucleotide which encodes or specifies a gene product, causes the gene product to be produced in a cell under most or all physiological conditions of the cell.

[0244] The term “inducible” promoter refers to a nucleotide sequence which, when operably linked with a polynucleotide which encodes or specifies a gene product, causes the gene product to be produced in a cell substantially only when an inducer which corresponds to the promoter is present in the cell.

[0245] The term “tissue-specific” promoter refers to a nucleotide sequence which, when operably linked with a polynucleotide encodes or specified by a gene, causes the gene product to be produced in a cell substantially only if the cell is a cell of the tissue type corresponding to the promoter.

[0246] The terms “cancer associated antigen” or “tumor antigen” interchangeably refers to a molecule (typically a protein, carbohydrate or lipid) that is expressed on the surface of a cancer cell, either entirely or as a fragment (e.g., MHC/peptide), and which is useful for the preferential targeting of a pharmacological agent to the cancer cell. In some embodiments, a tumor antigen is a marker expressed by both normal cells and cancer cells, e.g., a lineage marker, e.g., CD19 on B cells. In some embodiments, a tumor antigen is a cell surface molecule that is overexpressed in a cancer cell in comparison to a normal cell, for instance, 1-fold over expression, 2-fold overexpression, 3-fold overexpression or more in comparison to a normal cell. In some embodiments, a tumor antigen is a cell surface molecule that is inappropriately synthesized in the cancer cell, for instance, a molecule that contains deletions, additions or mutations in comparison to the molecule expressed on a normal cell. In some embodiments, a tumor antigen will be expressed exclusively on the cell surface of a cancer cell, entirely or as a fragment (e.g., MHC/peptide), and not synthesized or expressed on the surface of a normal cell. In some embodiments, the CARs of the present invention includes CARs comprising an antigen binding domain (e.g., antibody or antibody fragment) that binds to a MHC presented peptide. Normally, peptides derived from endogenous proteins fill the pockets of Major histocompatibility complex (MHC) class I molecules, and are recognized by T cell receptors (TCRs) on CD8+ T lymphocytes. The MHC class I complexes are constitutively expressed by all nucleated cells. In cancer, virus-specific and/or tumor-specific peptide/MHC complexes represent a unique class of cell surface targets for immunotherapy. TCR-like antibodies targeting peptides derived from viral or tumor antigens in the context of human leukocyte antigen (HLA)-A1 or HLA-A2 have been described (see, e.g., Sastry et al., J Virol. 2011 85(5):1935-1942; Sergeeva et al., Blood, 2011 117(16):4262-4272; Verma et al., J Immunol 2010 184(4):2156-2165; Willemsen et al., Gene Ther 2001 8(21):1601-1608; Dao et al., Sci Transl Med 2013 5(176):176ra33; Tassev et al., Cancer Gene Ther 2012 19(2):84-100). For example, TCR-like antibody can be identified from screening a library, such as a human scFv phage displayed library.

[0247] The term “tumor-supporting antigen” or “cancer-supporting antigen” interchangeably refer to a molecule (typically a protein, carbohydrate or lipid) that is expressed on the surface of a cell that is, itself, not cancerous, but supports the cancer cells, e.g., by promoting their growth or survival e.g., resistance to immune cells. Exemplary cells of this type include stromal cells and myeloid-derived suppressor cells (MDSCs). The tumor-supporting antigen itself need not play a role in supporting the tumor cells so long as the antigen is present on a cell that supports cancer cells.

[0248] The term “flexible polypeptide linker” or “linker” as used in the context of an scFv refers to a peptide linker that consists of amino acids such as glycine and/or serine residues used alone or in combination, to link variable heavy and variable light chain regions together. In one embodiment, the flexible polypeptide linker is a Gly/Ser linker and comprises the amino acid sequence (Gly-Gly-Gly-Ser)n (SEQ ID NO: 38), where n is a positive integer equal to or greater than 1. For example, n=1, n=2, n=3. n=4, n=5 and n=6, n=7, n=8, n=9 and n=10 In one embodiment, the flexible polypeptide linkers include, but are not limited to, (Gly4 Ser)4 (SEQ ID NO:27) or (Gly4 Ser)3 (SEQ ID NO:28). In another embodiment, the linkers include multiple repeats of (Gly2Ser), (GlySer) or (Gly3Ser) (SEQ ID NO:29). Also included within the scope of the invention are linkers described in WO2012/138475, incorporated herein by reference).

[0249] As used herein, a 5′ cap (also termed an RNA cap, an RNA 7-methylguanosine cap or an RNA m7G cap) is a modified guanine nucleotide that has been added to the “front” or 5′ end of a eukaryotic messenger RNA shortly after the start of transcription. The 5′ cap consists of a terminal group which is linked to the first transcribed nucleotide. Its presence is critical for recognition by the ribosome and protection from RNases. Cap addition is coupled to transcription, and occurs co-transcriptionally, such that each influences the other. Shortly after the start of transcription, the 5′ end of the mRNA being synthesized is bound by a cap-synthesizing complex associated with RNA polymerase. This enzymatic complex catalyzes the chemical reactions that are required for mRNA capping. Synthesis proceeds as a multi-step biochemical reaction. The capping moiety can be modified to modulate functionality of mRNA such as its stability or efficiency of translation.

[0250] As used herein, “in vitro transcribed RNA” refers to RNA, preferably mRNA, that has been synthesized in vitro. Generally, the in vitro transcribed RNA is generated from an in vitro transcription vector. The in vitro transcription vector comprises a template that is used to generate the in vitro transcribed RNA.

[0251] As used herein, a “poly(A)” is a series of adenosines attached by polyadenylation to the mRNA. In the preferred embodiment of a construct for transient expression, the polyA is between 50 and 5000 (SEQ ID NO: 30), preferably greater than 64, more preferably greater than 100, most preferably greater than 300 or 400. poly(A) sequences can be modified chemically or enzymatically to modulate mRNA functionality such as localization, stability or efficiency of translation.

[0252] As used herein, “polyadenylation” refers to the covalent linkage of a polyadenylyl moiety, or its modified variant, to a messenger RNA molecule. In eukaryotic organisms, most messenger RNA (mRNA) molecules are polyadenylated at the 3′ end. The 3′ poly(A) tail is a long sequence of adenine nucleotides (often several hundred) added to the pre-mRNA through the action of an enzyme, polyadenylate polymerase. In higher eukaryotes, the poly(A) tail is added onto transcripts that contain a specific sequence, the polyadenylation signal. The poly(A) tail and the protein bound to it aid in protecting mRNA from degradation by exonucleases. Polyadenylation is also important for transcription termination, export of the mRNA from the nucleus, and translation. Polyadenylation occurs in the nucleus immediately after transcription of DNA into RNA, but additionally can also occur later in the cytoplasm. After transcription has been terminated, the mRNA chain is cleaved through the action of an endonuclease complex associated with RNA polymerase. The cleavage site is usually characterized by the presence of the base sequence AAUAAA near the cleavage site. After the mRNA has been cleaved, adenosine residues are added to the free 3′ end at the cleavage site.

[0253] As used herein, “transient” refers to expression of a non-integrated transgene for a period of hours, days or weeks, wherein the period of time of expression is less than the period of time for expression of the gene if integrated into the genome or contained within a stable plasmid replicon in the host cell.

[0254] As used herein, the terms “treat”, “treatment” and “treating” refer to the reduction or amelioration of the progression, severity and/or duration of a proliferative disorder, or the amelioration of one or more symptoms (preferably, one or more discernible symptoms) of a proliferative disorder resulting from the administration of one or more therapies (e.g., one or more therapeutic agents such as a CAR of the invention). In specific embodiments, the terms “treat”, “treatment” and “treating” refer to the amelioration of at least one measurable physical parameter of a proliferative disorder, such as growth of a tumor, not necessarily discernible by the patient. In other embodiments the terms “treat”, “treatment” and “treating”-refer to the inhibition of the progression of a proliferative disorder, either physically by, e.g., stabilization of a discernible symptom, physiologically by, e.g., stabilization of a physical parameter, or both. In other embodiments the terms “treat”, “treatment” and “treating” refer to the reduction or stabilization of tumor size or cancerous cell count.

[0255] The term “signal transduction pathway” refers to the biochemical relationship between a variety of signal transduction molecules that play a role in the transmission of a signal from one portion of a cell to another portion of a cell. The phrase “cell surface receptor” includes molecules and complexes of molecules capable of receiving a signal and transmitting signal across the membrane of a cell.

[0256] The term “subject” is intended to include living organisms in which an immune response can be elicited (e.g., mammals, human).

[0257] The term, a “substantially purified” cell refers to a cell that is essentially free of other cell types. A substantially purified cell also refers to a cell which has been separated from other cell types with which it is normally associated in its naturally occurring state. In some instances, a population of substantially purified cells refers to a homogenous population of cells. In other instances, this term refers simply to cell that have been separated from the cells with which they are naturally associated in their natural state. In some aspects, the cells are cultured in vitro. In other aspects, the cells are not cultured in vitro.

[0258] The term “therapeutic” as used herein means a treatment. A therapeutic effect is obtained by reduction, suppression, remission, or eradication of a disease state.

[0259] The term “prophylaxis” as used herein means the prevention of or protective treatment for a disease or disease state.

[0260] In the context of the present invention, “tumor antigen” or “hyperproliferative disorder antigen” or “antigen associated with a hyperproliferative disorder” refers to antigens that are common to specific hyperproliferative disorders. In certain aspects, the hyperproliferative disorder antigens of the present invention are derived from, cancers including but not limited to primary or metastatic melanoma, thymoma, lymphoma, sarcoma, lung cancer, liver cancer, non-Hodgkin lymphoma, Hodgkin lymphoma, leukemias, uterine cancer, cervical cancer, bladder cancer, kidney cancer and adenocarcinomas such as breast cancer, prostate cancer (e.g., castrate-resistant or therapy-resistant prostate cancer, or metastatic prostate cancer), ovarian cancer, pancreatic cancer, and the like, or a plasma cell proliferative disorder, e.g., asymptomatic myeloma (smoldering multiple myeloma or indolent myeloma), monoclonal gammapathy of undetermined significance (MGUS), Waldenstrom's macroglobulinemia, plasmacytomas (e.g., plasma cell dyscrasia, solitary myeloma, solitary plasmacytoma, extramedullary plasmacytoma, and multiple plasmacytoma), systemic amyloid light chain amyloidosis, and POEMS syndrome (also known as Crow-Fukase syndrome, Takatsuki disease, and PEP syndrome).

[0261] The term “transfected” or “transformed” or “transduced” refers to a process by which exogenous nucleic acid is transferred or introduced into the host cell. A “transfected” or “transformed” or “transduced” cell is one which has been transfected, transformed or transduced with exogenous nucleic acid. The cell includes the primary subject cell and its progeny.

[0262] The term “specifically binds,” refers to an antibody, or a ligand, which recognizes and binds with a cognate binding partner (e.g., a stimulatory and/or costimulatory molecule present on a T cell) protein present in a sample, but which antibody or ligand does not substantially recognize or bind other molecules in the sample.

[0263] “Regulatable chimeric antigen receptor (RCAR),” as used herein, refers to a set of polypeptides, typically two in the simplest embodiments, which when in an immune effector cell, provides the cell with specificity for a target cell, typically a cancer cell, and with intracellular signal generation. In some embodiments, an RCAR comprises at least an extracellular antigen binding domain, a transmembrane domain and a cytoplasmic signaling domain (also referred to herein as “an intracellular signaling domain”) comprising a functional signaling domain derived from a stimulatory molecule and/or costimulatory molecule as defined herein in the context of a CAR molecule. In some embodiments, the set of polypeptides in the RCAR are not contiguous with each other, e.g., are in different polypeptide chains. In some embodiments, the RCAR includes a dimerization switch that, upon the presence of a dimerization molecule, can couple the polypeptides to one another, e.g., can couple an antigen binding domain to an intracellular signaling domain. In some embodiments, the RCAR is expressed in a cell (e.g., an immune effector cell) as described herein, e.g., an RCAR-expressing cell (also referred to herein as “RCARX cell”). In an embodiment the RCARX cell is a T cell, and is referred to as a RCART cell. In an embodiment the RCARX cell is an NK cell, and is referred to as a RCARN cell. The RCAR can provide the RCAR-expressing cell with specificity for a target cell, typically a cancer cell, and with regulatable intracellular signal generation or proliferation, which can optimize an immune effector property of the RCAR-expressing cell. In embodiments, an RCAR cell relies at least in part, on an antigen binding domain to provide specificity to a target cell that comprises the antigen bound by the antigen binding domain.

[0264] “Membrane anchor” or “membrane tethering domain”, as that term is used herein, refers to a polypeptide or moiety, e.g., a myristoyl group, sufficient to anchor an extracellular or intracellular domain to the plasma membrane.

[0265] “Switch domain,” as that term is used herein, e.g., when referring to an RCAR, refers to an entity, typically a polypeptide-based entity, that, in the presence of a dimerization molecule, associates with another switch domain. The association results in a functional coupling of a first entity linked to, e.g., fused to, a first switch domain, and a second entity linked to, e.g., fused to, a second switch domain A first and second switch domain are collectively referred to as a dimerization switch. In embodiments, the first and second switch domains are the same as one another, e.g., they are polypeptides having the same primary amino acid sequence, and are referred to collectively as a homodimerization switch. In embodiments, the first and second switch domains are different from one another, e.g., they are polypeptides having different primary amino acid sequences, and are referred to collectively as a heterodimerization switch. In embodiments, the switch is intracellular. In embodiments, the switch is extracellular. In embodiments, the switch domain is a polypeptide-based entity, e.g., FKBP or FRB-based, and the dimerization molecule is small molecule, e.g., a rapalogue. In embodiments, the switch domain is a polypeptide-based entity, e.g., an scFv that binds a myc peptide, and the dimerization molecule is a polypeptide, a fragment thereof, or a multimer of a polypeptide, e.g., a myc ligand or multimers of a myc ligand that bind to one or more myc scFvs. In embodiments, the switch domain is a polypeptide-based entity, e.g., myc receptor, and the dimerization molecule is an antibody or fragments thereof, e.g., myc antibody.

[0266] “Dimerization molecule,” as that term is used herein, e.g., when referring to an RCAR, refers to a molecule that promotes the association of a first switch domain with a second switch domain. In embodiments, the dimerization molecule does not naturally occur in the subject, or does not occur in concentrations that would result in significant dimerization. In embodiments, the dimerization molecule is a small molecule, e.g., rapamycin or a rapalogue, e.g, RAD001.

[0267] The term “bioequivalent” refers to an amount of an agent other than the reference compound (e.g., RAD001), required to produce an effect equivalent to the effect produced by the reference dose or reference amount of the reference compound (e.g., RAD001). In an embodiment the effect is the level of mTOR inhibition, e.g., as measured by P70 S6 kinase inhibition, e.g., as evaluated in an in vivo or in vitro assay, e.g., as measured by an assay described herein, e.g., the Boulay assay, or measurement of phosphorylated S6 levels by western blot. In an embodiment, the effect is alteration of the ratio of PD-1 positive/PD-1 negative T cells, as measured by cell sorting. In an embodiment a bioequivalent amount or dose of an mTOR inhibitor is the amount or dose that achieves the same level of P70 S6 kinase inhibition as does the reference dose or reference amount of a reference compound. In an embodiment, a bioequivalent amount or dose of an mTOR inhibitor is the amount or dose that achieves the same level of alteration in the ratio of PD-1 positive/PD-1 negative T cells as does the reference dose or reference amount of a reference compound.

[0268] The term “low, immune enhancing, dose” when used in conjuction with an mTOR inhibitor, e.g., an allosteric mTOR inhibitor, e.g., RAD001 or rapamycin, or a catalytic mTOR inhibitor, refers to a dose of mTOR inhibitor that partially, but not fully, inhibits mTOR activity, e.g., as measured by the inhibition of P70 S6 kinase activity. Methods for evaluating mTOR activity, e.g., by inhibition of P70 S6 kinase, are discussed herein. The dose is insufficient to result in complete immune suppression but is sufficient to enhance the immune response. In an embodiment, the low, immune enhancing, dose of mTOR inhibitor results in a decrease in the number of PD-1 positive immune effector cells, e.g., T cells or NK cells, and/or an increase in the number of PD-1 negative immune effector cells, e.g., T cells or NK cells, or an increase in the ratio of PD-1 negative immune effector cells (e.g., T cells or NK cells)/PD-1 positive immune effector cells (e.g., T cells or NK cells).

[0269] In an embodiment, the low, immune enhancing, dose of mTOR inhibitor results in an increase in the number of naive T cells. In an embodiment, the low, immune enhancing, dose of mTOR inhibitor results in one or more of the following:

[0270] an increase in the expression of one or more of the following markers: CD62Lhigh, CD127high, CD27+, and BCL2, e.g., on memory T cells, e.g., memory T cell precursors;

[0271] a decrease in the expression of KLRG1, e.g., on memory T cells, e.g., memory T cell precursors; and

[0272] an increase in the number of memory T cell precursors, e.g., cells with any one or combination of the following characteristics: increased CD62Lhigh, increased CD127high, increased CD27+, decreased KLRG1, and increased BCL2;

[0273] wherein any of the changes described above occurs, e.g., at least transiently, e.g., as compared to a non-treated subject.

[0274] “Refractory” as used herein refers to a disease, e.g., cancer, that does not respond to a treatment. In embodiments, a refractory cancer can be resistant to a treatment before or at the beginning of the treatment. In other embodiments, the refractory cancer can become resistant during a treatment. A refractory cancer is also called a resistant cancer.

[0275] “Relapsed” or a “relapse” as used herein refers to the reappearance of a disease (e.g., cancer) or the signs and symptoms of a disease such as cancer after a period of improvement or responsiveness, e.g., after prior treatment of a therapy, e.g., cancer therapy. For example, the period of responsiveness may involve the level of cancer cells falling below a certain threshold, e.g., below 20%, 15%, 10%, 5%, 4%, 3%, 2%, or 1%. The reappearance may involve the level of cancer cells rising above a certain threshold, e.g., above 20%, 15%, 10%, 5%, 4%, 3%, 2%, or 1%.

[0276] Ranges: throughout this disclosure, various aspects of the invention can be presented in a range format. It should be understood that the description in range format is merely for convenience and brevity and should not be construed as an inflexible limitation on the scope of the invention. Accordingly, the description of a range should be considered to have specifically disclosed all the possible subranges as well as individual numerical values within that range. For example, description of a range such as from 1 to 6 should be considered to have specifically disclosed subranges such as from 1 to 3, from 1 to 4, from 1 to 5, from 2 to 4, from 2 to 6, from 3 to 6 etc., as well as individual numbers within that range, for example, 1, 2, 2.7, 3, 4, 5, 5.3, and 6. As another example, a range such as 95-99% identity, includes something with 95%, 96%, 97%, 98% or 99% identity, and includes subranges such as 96-99%, 96-98%, 96-97%, 97-99%, 97-98% and 98-99% identity. This applies regardless of the breadth of the range.

[0277] A “gene editing system” as the term is used herein, refers to a system, e.g., one or more molecules, that direct and effect an alteration, e.g., a deletion, of one or more nucleic acids at or near a site of genomic DNA targeted by said system. Gene editing systems are known in the art, and are described more fully below.

[0278] Certain chemical definitions are provided below.

[0279] The term “halo” or “halogen” refers to any radical of fluorine, chlorine, bromine or iodine.

[0280] The term “alkyl” refers to a hydrocarbon chain that may be a straight chain or branched chain, containing the indicated number of carbon atoms. For example, C₁-C₁₂ alkyl indicates that the group may have from 1 to 12 (inclusive) carbon atoms in it. The term “haloalkyl” refers to an alkyl in which one or more hydrogen atoms are replaced by halo, and includes alkyl moieties in which all hydrogens have been replaced by halo (e.g., perfluoroalkyl). Alkyl may be optionally substituted. Suitable substituents on an alkyl include, without limitation, halo, alkoxy, haloalkoxy (e.g., perfluoroalkoxy such as OCF₃), hydroxy, carboxy, carboxylate, cyano, nitro, amino, alkyl amino, SO₃H, sulfate, phosphate, oxo, thioxo (e.g., C═S), imino (alkyl, aryl, aralkyl), S(O)ₙalkyl (where n is 0-2), S(O)ₙaryl (where n is 0-2), S(O)ₙheteroaryl (where n is 0-2), S(O)ₙ heterocyclyl (where n is 0-2), amine (mono-, di-, alkyl, cycloalkyl, aralkyl, heteroaralkyl, aryl, heteroaryl, and combinations thereof), ester (alkyl, aralkyl, heteroaralkyl, aryl, heteroaryl), amide (mono-, di-, alkyl, aralkyl, heteroaralkyl, aryl, heteroaryl, and combinations thereof), sulfonamide (mono-, di-, alkyl, aralkyl, heteroaralkyl, and combinations thereof). As used herein, the term “lower alkyl” denotes a saturated straight- or branched-chain alkyl group containing from 1 to 7 carbon atoms, for example, methyl, ethyl, propyl, isopropyl, n-butyl, i-butyl, 2-butyl, t-butyl and the like. Preferred lower alkyl groups are groups with 1-4 carbon atoms. As used herein, the term “lower alkinyl” denotes a unsaturated straight- or branched-carbon chain containing from 2 to 7 carbon atoms and containing at least one triple bond.

[0281] The term “alkoxy” refers to an —O-alkyl radical. The term “lower alkoxy” denotes a group wherein the alkyl residues is as defined above, and which is attached via an oxygen atom.

[0282] The terms “arylalkyl” or “aralkyl” refer to an alkyl moiety in which an alkyl hydrogen atom is replaced by an aryl group. Aralkyl includes groups in which more than one hydrogen atom has been replaced by an aryl group. Examples of “arylalkyl” or “aralkyl” include benzyl, 2-phenylethyl, 3-phenylpropyl, 9-fluorenyl, benzhydryl, and trityl groups.

[0283] The term “alkylene” refers to a divalent alkyl, e.g., —CH₂—, —CH₂CH₂—, and —CH₂CH₂CH₂—.

[0284] The term “alkenyl” refers to a straight or branched hydrocarbon chain containing 2-12 carbon atoms and having one or more double bonds. Examples of alkenyl groups include, but are not limited to, allyl, propenyl, 2-butenyl, 3-hexenyl and 3-octenyl groups. One of the double bond carbons may optionally be the point of attachment of the alkenyl substituent. The term “alkynyl” refers to a straight or branched hydrocarbon chain containing 2-12 carbon atoms and characterized in having one or more triple bonds. Examples of alkynyl groups include, but are not limited to, ethynyl, propargyl, and 3-hexynyl. One of the triple bond carbons may optionally be the point of attachment of the alkynyl substituent.

[0285] Unless otherwise indicated, as used herein, the term “alkenoxy”, means “alkenyl-O—”, wherein “alkenyl” is as defined above. Unless otherwise indicated, as used herein, the term “alkynoxy”, means “alkynyl-O—”, wherein “alkynyl” is as defined above.

[0286] The terms “alkylamino” and “dialkylamino” refer to —NH(alkyl) and —NH(alkyl)₂ radicals respectively. The term “aralkylamino” refers to a —NH(aralkyl) radical. The term alkylaminoalkyl refers to a (alkyl)NH-alkyl-radical; the term dialkylaminoalkyl refers to a (alkyl)₂N-alkyl-radical The term “alkoxy” refers to an —O-alkyl radical. The term “mercapto” refers to an SH radical. The term “thioalkoxy” refers to an —S-alkyl radical. The term thioaryloxy refers to an —S-aryl radical. “Hydroxy” refers to the radical —OH.

[0287] The term “aralkyl”, as used herein, refers to an alkyl group substituted with an aryl group (e.g., an aromatic or heteroaromatic group).

[0288] The term “aryl” refers to an aromatic monocyclic, bicyclic, or tricyclic hydrocarbon ring system, wherein any ring atom capable of substitution can be substituted (e.g., by one or more substituents). Examples of aryl moieties include, but are not limited to, phenyl, naphthyl, and anthracenyl.

[0289] The term “cycloalkyl” as employed herein includes saturated cyclic, bicyclic, tricyclic, or polycyclic hydrocarbon groups having 3 to 12 carbons. Any ring atom can be substituted (e.g., by one or more substituents). The cycloalkyl groups can contain fused rings. Fused rings are rings that share a common carbon atom. Examples of cycloalkyl moieties include, but are not limited to, cyclopropyl, cyclohexyl, methylcyclohexyl, adamantyl, and norbornyl.

[0290] “Bicycloalkyl” and “tricycloalkyl” groups are non-aromatic saturated carbocyclic groups consisting of two or three rings respectively, wherein said rings share at least one carbon atom. Unless otherwise indicated, for purposes of the present invention, bicycloalkyl groups include spiro groups and fused ring groups. Examples of bicycloalkyl groups include, but are not limited to, bicyclo-[3.1.0]-hexyl, bicyclo-2.2.1]-hept-1-yl, norbomyl, spiro[4.5]decyl, spiro[4.4]nonyl, spiro[4.3]octyl, and spiro[4.2]heptyl. An example of a tricycloalkyl group is adamantanyl. Other cycloalkyl, bicycloalkyl, and tricycloalkyl groups are known in the art, and such groups are encompassed by the definitions “cycloalkyl”, “bicycloalkyl” and “tricycloalkyl” herein.

[0291] “Cycloalkenyl”, “bicycloalkenyl”, and “tricycloalkenyl” refer to non-aromatic carbocyclic cycloalkyl, bicycloalkyl, and tricycloalkyl moieties as defined above, except comprising one or more carbon-carbon double bonds connecting carbon ring members (an “endocyclic” double bond) and/or one or more carbon-carbon double bonds connecting a carbon ring member and an adjacent non-ring carbon (an “exocyclic” double bond). Examples of cycloalkenyl groups include, but are not limited to, cyclopentenyl, cyclobutenyl, and cyclohexenyl, and a non-limiting example of a bicycloalkenyl group is norbornenyl. Other cycloalkenyl, bicycloalkenyl, and tricycloalkenyl groups are known in the art, and such groups are included within the definitions “cycloalkenyl”, “bicycloalkenyl” and “tricycloalkenyl” herein. Cycloalkyl, cycloalkenyl, bicycloalkyl, and bicycloalkenyl groups also include groups that are substituted with one or more oxo moieties. Examples of such groups with oxo moieties are oxocyclopentyl, oxocyclobutyl, oxocyclopentenyl, and norcamphoryl.

[0292] The term “heteroaryl” refers to a fully aromatic 5-8 membered monocyclic, 8-12 membered bicyclic, or 11-14 membered tricyclic ring system having 1-3 heteroatoms if monocyclic, 1-6 heteroatoms if bicyclic, or 1-9 heteroatoms if tricyclic, said heteroatoms selected from O, N, or S (e.g., carbon atoms and 1-3, 1-6, or 1-9 heteroatoms selected independently from N, O, or S if monocyclic, bicyclic, or tricyclic, respectively). Any ring atom can be substituted (e.g., by one or more substituents). The point of attachment of a heteroaryl is on the ring containing said heteroatom(s).

[0293] The term “heterocyclyl” or “heterocyloalkyl” refers to a nonaromatic 3-10 membered monocyclic, 8-12 membered bicyclic, or 11-14 membered tricyclic ring system having 1-3 heteroatoms if monocyclic, 1-6 heteroatoms if bicyclic, or 1-9 heteroatoms if tricyclic, said heteroatoms selected from O, N, or S (e.g., carbon atoms and 1-3, 1-6, or 1-9 heteroatoms of N, O, or S if monocyclic, bicyclic, or tricyclic, respectively). The point of attachment of a heterocyclyl is on the ring containing said heteroatom(s). The heteroatom may optionally be the point of attachment of the heterocyclyl substituent. Any ring atom can be substituted (e.g., by one or more substituents). The heterocyclyl groups can contain fused rings. Fused rings are rings that share a common carbon atom. Examples of heterocyclyl include, but are not limited to, tetrahydrofuranyl, tetrahydropyranyl, piperidinyl, morpholino, pyrrolinyl, pyrimidinyl, and pyrrolidinyl.

[0294] Bicyclic and tricyclic ring systems containing one or more heteroatoms and both aromatic and non-aromatic rings are considered to be heterocyclyl groups according to the present definition.

[0295] The term “saturated or partially saturated heterocyclyl” refers to a non-aromatic cylic structure that includes at least one heteroatom. Heterocyclyl groups include, for example, thiophene, thianthrene, furan, pyran, isobenzofuran, chromene, xanthene, phenoxathiin, pyrrole, imidazole, pyrazole, isothiazole, isoxazole, pyridine, pyrazine, pyrimidine, pyridazine, indolizine, isoindole, indole, indazole, purine, quinolizine, isoquinoline, quinoline, phthalazine, naphthyridine, quinoxaline, quinazoline, cinnoline, pteridine, carbazole, carboline, phenanthridine, acridine, pyrimidine, phenanthroline, phenazine, phenarsazine, phenothiazine, furazan, phenoxazine, pyrrolidine, oxolane, thiolane, oxazole, piperidine, piperazine, morpholine, lactones, lactams such as azetidinones and pyrrolidinones, sultams, sultones, and the like. The heterocyclic ring can be substituted at one or more positions with such substituents as described above, as for example, halogen, alkyl, aralkyl, alkenyl, alkynyl, cycloalkyl, hydroxyl, amino, nitro, sulfhydryl, imino, amido, phosphate, phosphonate, phosphinate, carbonyl, carboxyl, silyl, ether, alkylthio, sulfonyl, ketone, aldehyde, ester, a heterocyclyl, an aromatic or heteroaromatic moiety, —CF₃, —CN, or the like.

[0296] The term “heterocyclylalkyl”, as used herein, refers to an alkyl group substituted with a heterocycle group. The term “cycloalkylalkyl”, as used herein, refers to an alkyl group substituted with a cycloalkyl group.

[0297] The term “cycloalkenyl” refers to partially unsaturated, nonaromatic, cyclic, bicyclic, tricyclic, or polycyclic hydrocarbon groups having 5 to 12 carbons, preferably 5 to 8 carbons. The unsaturated carbon may optionally be the point of attachment of the cycloalkenyl substituent. Any ring atom can be substituted (e.g., by one or more substituents). The cycloalkenyl groups can contain fused rings. Fused rings are rings that share a common carbon atom. Examples of cycloalkenyl moieties include, but are not limited to, cyclohexenyl, cyclohexadienyl, or norbornenyl.

[0298] The term “heterocycloalkenyl” refers to a partially saturated, nonaromatic 5-10 membered monocyclic, 8-12 membered bicyclic, or 11-14 membered tricyclic ring system having 1-3 heteroatoms if monocyclic, 1-6 heteroatoms if bicyclic, or 1-9 heteroatoms if tricyclic, said heteroatoms selected from O, N, or S (e.g., carbon atoms and 1-3, 1-6, or 1-9 heteroatoms of N, O, or S if monocyclic, bicyclic, or tricyclic, respectively). The unsaturated carbon or the heteroatom may optionally be the point of attachment of the heterocycloalkenyl substituent. Any ring atom can be substituted (e.g., by one or more substituents). The heterocycloalkenyl groups can contain fused rings. Fused rings are rings that share a common carbon atom. Examples of heterocycloalkenyl include but are not limited to tetrahydropyridyl and dihydropyranyl.

[0299] The terms “hetaralkyl” and “heteroaralkyl”, as used herein, refers to an alkyl group substituted with a heteroaryl group.

[0300] The term “oxo” refers to an oxygen atom, which forms a carbonyl when attached to carbon, an N-oxide when attached to nitrogen, and a sulfoxide or sulfone when attached to sulfur.

[0301] The term “acyl” refers to an alkylcarbonyl, cycloalkylcarbonyl, arylcarbonyl, heterocyclylcarbonyl, or heteroarylcarbonyl substituent, any of which may be further substituted (e.g., by one or more substituents).

[0302] The term “substituents” refers to a group “substituted” on an alkyl, alkoxy, cycloalkyl, cycloalkylalkyl, alkenyl, alkynyl, heterocyclyl, heterocyclylalkyl, heterocycloalkenyl, cycloalkenyl, aryl, aralkyl, heteroaryl or heteroaralkyl group at any atom of that group. Any atom can be substituted. Suitable substituents include, without limitation, alkyl (e.g., C1, C2, C3, C4, C5, C6, C7, C8, C9, C10, C11, C12 straight or branched chain alkyl), cycloalkyl, haloalkyl (e.g., perfluoroalkyl such as CF₃), aryl, heteroaryl, aralkyl, heteroaralkyl, heterocyclyl, alkenyl, alkynyl, cycloalkenyl, heterocycloalkenyl, alkoxy, haloalkoxy (e.g., perfluoroalkoxy such as OCF₃), halo, hydroxy, carboxy, carboxylate, cyano, nitro, amino, alkyl amino, SO₃H, sulfate, phosphate, methylenedioxy (—O—CH₂—O— wherein oxygens are attached to vicinal atoms), ethylenedioxy, oxo, thioxo (e.g., C═S), imino (alkyl, aryl, aralkyl), S(O)ₙalkyl (where n is 0-2), S(O)ₙ aryl (where n is 0-2), S(O)ₙ heteroaryl (where n is 0-2), S(O)ₙ heterocyclyl (where n is 0-2), amine (mono-, di-, alkyl, cycloalkyl, aralkyl, heteroaralkyl, aryl, heteroaryl, and combinations thereof), ester (alkyl, aralkyl, heteroaralkyl, aryl, heteroaryl), amide (mono-, di-, alkyl, aralkyl, heteroaralkyl, aryl, heteroaryl, and combinations thereof), sulfonamide (mono-, di-, alkyl, aralkyl, heteroaralkyl, and combinations thereof). In one aspect, the substituents on a group are independently any one single, or any subset of the aforementioned substituents. In another aspect, a substituent may itself be substituted with any one of the above substituents.

[0303] “Pharmaceutically acceptable” means approved or approvable by a regulatory agency of the Federal or a state government or the corresponding agency in countries other than the United States, or that is listed in the U.S. Pharmacopoeia or other generally recognized pharmacopoeia for use in animals, and more particularly, in humans.

[0304] “Pharmaceutically acceptable salt” refers to a salt of a compound of the invention that is pharmaceutically acceptable and that possesses the desired pharmacological activity of the parent compound. In particular, such salts are non-toxic may be inorganic or organic acid addition salts and base addition salts. Specifically, such salts include: (1) acid addition salts, formed with inorganic acids such as hydrochloric acid, hydrobromic acid, sulfuric acid, nitric acid, phosphoric acid, and the like; or formed with organic acids such as acetic acid, propionic acid, hexanoic acid, cyclopentanepropionic acid, glycolic acid, pyruvic acid, lactic acid, malonic acid, succinic acid, malic acid, maleic acid, fumaric acid, tartaric acid, citric acid, benzoic acid, 3-(4-hydroxybenzoyl) benzoic acid, cinnamic acid, mandelic acid, methanesulfonic acid, ethanesulfonic acid, 1,2-ethane-disulfonic acid, 2-hydroxyethanesulfonic acid, benzenesulfonic acid, 4-chlorobenzenesulfonic acid, 2-naphthalenesulfonic acid, 4-toluenesulfonic acid, camphorsulfonic acid, 4-methylbicyclo[2.2.2]-oct-2-ene-1-carboxylic acid, glucoheptonic acid, 3-phenylpropionic acid, trimethylacetic acid, tertiary butylacetic acid, lauryl sulfuric acid, gluconic acid, glutamic acid, hydroxynaphthoic acid, salicylic acid, stearic acid, muconic acid, and the like; or (2) salts formed when an acidic proton present in the parent compound either is replaced by a metal ion, e.g., an alkali metal ion, an alkaline earth ion, or an aluminum ion; or coordinates with an organic base such as ethanolamine, diethanolamine, triethanolamine, N-methylglucamine and the like. Salts further include, by way of example only, sodium, potassium, calcium, magnesium, ammonium, tetraalkylammonium, and the like; and when the compound contains a basic functionality, salts of non toxic organic or inorganic acids, such as hydrochloride, hydrobromide, tartrate, mesylate, acetate, maleate, oxalate and the like. The term “pharmaceutically acceptable cation” refers to an acceptable cationic counter-ion of an acidic functional group. Such cations are exemplified by sodium, potassium, calcium, magnesium, ammonium, tetraalkylammonium cations, and the like (see, e.g., Berge, et al., J. Pharm. Sci. 66(1): 1-79 (January“77).

[0305] Various aspects of the compositions and methods herein are described in further detail below. Additional definitions are set out throughout the specification.

### Gamma Secretase Inhibitor (GSI)

[0306] The present invention provides compositions comprising, e.g., a gamma secretase inhibitor (GSI), and methods for enhancing the function of a BCMA CAR-expressing cell, by using such compositions and/or other means as described herein. Any inhibitor of gamma secretase (e.g., a subunit of gamma secretase, e.g., presenilin, nicastrin, APH-1, or PEN-2), and any modulator of a gene encoding gamma secretase (e.g., a subunit of gamma secretase, e.g., presenilin, nicastrin, APH-1, or PEN-2), known in the art, can be used according to the present invention. Examples of GSIs are described below.

### Small Molecules Targeting Gamma Secretase

[0307] The compositions, methods and uses described herein comprise a gamma secretase inhibitor (GSI). In some embodiments, the GSI is a small molecule that reduces the expression and/or function of gamma secretase.

[0308] In some embodiments, the compound is a compound of formula (I) or a pharmaceutically acceptable salt thereof;

[chemical structure]

wherein ring A is aryl or heteroaryl; each of R¹, R², and R⁴ is independently hydrogen, C₁-C₆ alkyl, cycloalkyl, heterocyclyl, cycloalkylalkyl, heterocyclylalkyl, aryl, heteroaryl, aralkyl, or heteroaralkyl, wherein each C₁-C₆ alkyl, cycloalkyl, heterocyclyl, cycloalkylalkyl, heterocyclylalkyl, aryl, heteroaryl, aralkyl, or heteroaralkyl is substituted with 0-6 independent occurrences of halogen, —OR^{A}, —SR^{A}, —C(O)OR^{A}, —C(O)N(R^{A})(R^{B}), —N(R^{A})(R^{B}), or —C(NR^{C})N(R^{A})(R^{B}); each R^{3a}, R^{3b}, R^{5a}, and R^{5b} is independently hydrogen, halogen, —OH, C₁-C₆ alkyl, C₁-C₆ alkoxy, cycloalkyl, heterocyclyl, cycloalkylalkyl, heterocyclylalkyl, aryl, heteroaryl, aralkyl, or heteroaralkyl, wherein each C₁-C₆ alkyl, C₁-C₆ alkoxy, cycloalkyl, heterocyclyl, cycloalkylalkyl, heterocyclylalkyl, aryl, heteroaryl, aralkyl, or heteroaralkyl is substituted with 0-6 independent occurrences of halogen, —OH, —OR^{A}, —SR^{A}, —C(O)OR^{A}, —C(O)N(R^{A})(R^{B}), —N(R^{A})(R^{B}), or —C(NR^{c})N(R^{A})(R^{B}); R⁶ is hydrogen, C₁-C₆ alkyl, cycloalkyl, heterocyclyl, cycloalkylalkyl, heterocyclylalkyl, aryl, heteroaryl, aralkyl, or heteroaralkyl, wherein each C₁-C₆ alkyl, cycloalkyl, heterocyclyl, cycloalkylalkyl, heterocyclylalkyl, aryl, heteroaryl, aralkyl, or heteroaralkyl is substituted with 0-6 independent occurrences of halogen, —OH, or C₁-C₆ alkoxy; and each R^{A}, R^{B}, and R^{c} is independently hydrogen, C₁-C₆ alkyl, cycloalkyl, heterocyclyl, cycloalkylalkyl, heterocyclylalkyl, aryl, heteroaryl, aralkyl, or heteroaralkyl, wherein each C₁-C₆ alkyl, cycloalkyl, heterocyclyl, cycloalkylalkyl, heterocyclylalkyl, aryl, heteroaryl, aralkyl, or heteroaralkyl is substituted with 0-6 independent occurrences of halogen, —OH, or C₁-C₆ alkoxy.

[0309] In some embodiments, ring A is aryl (e.g., phenyl). In some embodiments, R¹ is —CH₃. In some embodiments, each of R² and R⁴ is independently hydrogen. In some embodiments, R^{1a} is —CH₃ and R^{3b} is hydrogen. In some embodiments, R^{5a} is hydrogen and R^{5b} is —CH(CH₃)₂. In some embodiments, R⁶ is hydrogen.

[0310] In some embodiments, the compound of formula (I) is a compound described in U.S. Pat. No. 7,468,365, which is herein incorporated by reference in its entirety. In one embodiment, the compound of formula (I) is LY-450139, i.e., semagacestat, (S)-2-hydroxy-3-methyl-N—((S)-1-(((S)-3-methyl-2-oxo-2,3,4,5-tetrahydro-1H-benzo[d]azepin-1-yl)amino)-1-oxopropan-2-yl)butanamide, or a pharmaceutically acceptable salt thereof. In one embodiment, the compound is

[chemical structure]

or a pharmaceutically acceptable salt thereof.

[0311] In some embodiments, the compound is a compound of formula (II) or a pharmaceutically acceptable salt thereof;

[chemical structure]

wherein ring B is aryl or heteroaryl; L is a bond, C₁-C₆ alkylene, —S(O)₂—, —C(O)—, —N(R^{E})(O)C—, or —OC(O)—; each R⁷ is independently halogen, —OH, C₁-C₆ alkyl, C₁-C₆ alkoxy, cycloalkyl, heterocyclyl, cycloalkylalkyl, heterocyclylalkyl, aryl, heteroaryl, aralkyl, or heteroaralkyl, wherein each C₁-C₆ alkyl, C₁-C₆ alkoxy, cycloalkyl, heterocyclyl, cycloalkylalkyl, heterocyclylalkyl, aryl, heteroaryl, aralkyl, or heteroaralkyl is independently substituted with 0-6 occurrences of halogen, —OR^{D}, —SR^{D}, —C(O)OR^{D}, —C(O)N(R^{D})(R^{E}), —N(R^{D})(R^{E}), or —C(NR^{E})N(R^{D})(R^{E}); R⁸ is hydrogen, C₁-C₆ alkyl, C₁-C₆ alkoxy, cycloalkyl, heterocyclyl, cycloalkylalkyl, heterocyclylalkyl, aryl, heteroaryl, aralkyl, or heteroaralkyl, wherein each C₁-C₆ alkyl, C₁-C₆ alkoxy, cycloalkyl, heterocyclyl, cycloalkylalkyl, heterocyclylalkyl, aryl, heteroaryl, aralkyl, or heteroaralkyl is substituted with 0-6 independent occurrences of halogen, —OR^{D}, —SR^{D}, —C(O)OR^{D}, —C(O)N(R^{D})(R^{E}), —N(R^{D})(R^{E}), or —C(NR^{E})N(R^{D})(R^{E}); each of R⁹ and R¹⁰ is independently hydrogen, halogen, —OH, C₁-C₆ alkyl, C₁-C₆ alkoxy, cycloalkyl, heterocyclyl, cycloalkylalkyl, heterocyclylalkyl, aryl, heteroaryl, aralkyl, or heteroaralkyl, wherein each C₁-C₆ alkyl, C₁-C₆ alkoxy, cycloalkyl, heterocyclyl, aryl, heteroaryl, aralkyl, or heteroaralkyl is substituted with 0-6 independent occurrences of halogen, —OR^{D}, —SR^{D}, —C(O)OR^{D}, —C(O)N(R^{D})(R^{E}), —N(R^{D})(R^{E}), or —C(NR^{I})N(R^{G})(R^{H}); each R^{D}, R^{E}, and R^{E} is independently hydrogen, C₁-C₆ alkyl, cycloalkyl, heterocyclyl, cycloalkylalkyl, heterocyclylalkyl, aryl, heteroaryl, aralkyl, or heteroaralkyl, wherein each C₁-C₆ alkyl, cycloalkyl, heterocyclyl, cycloalkylalkyl, heterocyclylalkyl, aryl, heteroaryl, aralkyl, or heteroaralkyl is substituted with 0-6 independent occurrences of halogen, —OH, or C₁-C₆ alkoxy; and n is 0, 1, 2, 3, 4, or 5.

[0312] In some embodiments, ring B is heteroaryl (e.g., thiofuranyl). In some embodiments, L is —S(O)₂. In some embodiments, R⁷ is chloro and n is 1. In some embodiments, R⁸ is —CH₂OH. In some embodiments, each of R⁹ and R¹⁰ is independently —CF₃.

[0313] In some embodiments, the compound of formula (II) is a compound described in U.S. Pat. No. 7,687,666, which is herein incorporated by reference in its entirety. In one embodiment, the compound of formula (II) is PF-5212362, i.e., begacestat, GSI-953, or (R)-5-chloro-N-(4,4,4-trifluoro-1-hydroxy-3-(trifluoromethyl)butan-2-yl)thiophene-2-sulfonamide, or a pharmaceutically acceptable salt thereof. In one embodiment, the compound is

[chemical structure]

or a pharmaceutically acceptable salt thereof.

[0314] In some embodiments, the compound is a compound is a compound of formula (III) or a pharmaceutically acceptable salt thereof;

[chemical structure]

wherein each of rings C and D is independently aryl or heteroaryl; each of R¹¹, R¹², and R¹⁴ is independently hydrogen, C₁-C₆ alkyl, C₁-C₆ alkoxy, —S(O)R^{G}—, —S(O)₂R^{G}—, cycloalkyl, heterocyclyl, cycloalkylalkyl, heterocyclylalkyl, aryl, heteroaryl, aralkyl, or heteroaralkyl, wherein each C₁-C₆ alkyl, C₁-C₆ alkoxy, cycloalkyl, heterocyclyl, cycloalkylalkyl, heterocyclylalkyl, aryl, heteroaryl, aralkyl, or heteroaralkyl is substituted with 0-6 independent occurrences of halogen, —OR^{G}, —SR^{G}, —C(O)OR^{G}, —C(O)N(R^{G})(R^{H}), —N(R^{G})(R^{H}), or —C(NR^{I})N(R^{G})(R^{H}); each of R^{13a} and R^{13b} is hydrogen, halogen, —OH, C₁-C₆ alkyl, C₁-C₆ alkoxy, cycloalkyl, heterocyclyl, cycloalkylalkyl, heterocyclylalkyl, aryl, heteroaryl, aralkyl, or heteroaralkyl, wherein each C₁-C₆ alkyl, C₁-C₆ alkoxy, cycloalkyl, heterocyclyl, cycloalkylalkyl, heterocyclylalkyl, aryl, heteroaryl, aralkyl, or heteroaralkyl is substituted with 0-6 independent occurrences of halogen, —OR^{G}, —SR^{G}, —C(O)OR^{G}, —C(O)N(R^{G})(R^{H}), —N(R^{G})(R^{H}), or —C(NR^{I})N(R^{G})(R^{H}); each R¹⁵ and R¹⁶ is independently halogen, —OH, C₁-C₆ alkyl, C₁-C₆ alkoxy, cycloalkyl, heterocyclyl, cycloalkylalkyl, heterocyclylalkyl, aryl, heteroaryl, aralkyl, or heteroaralkyl, wherein each C₁-C₆ alkyl, C₁-C₆ alkoxy, cycloalkyl, heterocyclyl, cycloalkylalkyl, heterocyclylalkyl, aryl, heteroaryl, aralkyl, or heteroaralkyl is substituted with 0-6 independent occurrences of halogen, —OR^{G}, —SR^{G}, —C(O)OR^{G}, —C(O)N(R^{G})(R^{H}), —N(R^{G})(R^{H}), or —C(NR^{I})N(R^{G})(R^{H}); each R^{G}, R^{H}, and R^{I} is independently hydrogen, C₁-C₆ alkyl, cycloalkyl, heterocyclyl, cycloalkylalkyl, heterocyclylalkyl, aryl, heteroaryl, aralkyl, or heteroaralkyl, wherein each C₁-C₆ alkyl, cycloalkyl, heterocyclyl, cycloalkylalkyl, heterocyclylalkyl, aryl, heteroaryl, aralkyl, or heteroaralkyl is substituted with 0-6 independent occurrences of halogen, —OH, or C₁-C₆ alkoxy; and each of m, n, and p is independently 0, 1, 2, 3, 4, or 5.

[0315] In some embodiments, ring C is aryl (e.g., phenyl). In some embodiments, ring D is heteroaryl (e.g., 1,2,4-oxadiazole). In some embodiments, R¹⁵ is fluoro and n is 1. In some embodiments, p is 0. In some embodiments, m is 1. In some embodiments, R¹⁴ is —S(O)₂R^{G} and R^{G} is chlorophenyl. In some embodiments, R^{13a} is —CH₂CH₂CF₃ and R^{13b} is hydrogen. In some embodiments, each R¹¹ and R¹² is independently hydrogen.

[0316] In some embodiments, the compound of formula (III) is a compound described in U.S. Pat. No. 8,084,477, which is herein incorporated by reference in its entirety. In one embodiment, the compound of formula (III) is BMS-708163, i.e., avagacestat, or (R)-2-((4-chloro-N-(2-fluoro-4-(1,2,4-oxadiazol-3-yl)benzyl)phenyl)sulfonamido)-5,5,5-trifluoropentanamide, or a pharmaceutically acceptable salt thereof. In one embodiment, the compound is

[chemical structure]

or a pharmaceutically acceptable salt thereof.

[0317] In some embodiments, the compound is a compound of formula (IV);

[chemical structure]

wherein R¹⁷ is selected from

[chemical structure]

R¹⁸ is lower alkyl, lower alkinyl, —(CH₂)ₙ—O-lower alkyl, —(CH₂)ₙ—S-lower alkyl, —(CH₂)ₙ—CN, —(CR′R″)ₙ—CF₃, —(CR′R″)ₙ—CHF₂, —(CR′R″)ₙ—CH₂F, —(CH₂)ₙ—C(O)O-lower alkyl, —(CH₂)ₙ-halogen, or is —(CH₂)ₙ-cycloalkyl optionally substituted by one or more substituents selected from the group consisting of phenyl, halogen and CF₃; R′,R″ are each independently hydrogen, lower alkyl, lower alkoxy, halogen or hydroxy; R¹⁹, R²⁰ are each independently hydrogen, lower alkyl, lower alkoxy, phenyl or halogen; R²¹ is hydrogen, lower alkyl, —(CH₂)ₙ—CF₃ or —(CH₂)ₙ-cycloalkyl; R²² is hydrogen or halogen; R²³ is hydrogen or lower alkyl; R²⁴ is hydrogen, lower alkyl, lower alkinyl, —(CH₂)ₙ—CF₃, —(CH₂)ₙ-cycloalkyl or —(CH₂)ₙ-phenyl optionally substituted by halogen; R²⁵ is hydrogen, lower alkyl, —C(O)H, —C(O)-lower alkyl, —C(O)—CF₃, —C(O)—CH₂F, —C(O)—CHF₂, —C(O)-cycloalkyl, —C(O)—(CH₂)ₙ—O-lower alkyl, —C(O)O—(CH₂)ₙ-cycloalkyl, —C(O)-phenyl optionally substituted by one or more substituents selected from the group consisting of halogen and —C(O)O-lower alkyl, or is —S(O)₂-lower alkyl, —S(O)₂—CF₃, —(CH₂)ₙ-cycloalkyl or is —(CH₂)ₙ-phenyl optionally substituted by halogen; n is 0, 1, 2, 3 or 4.

[0318] In some embodiments, R¹⁷ is 5,7-dihydro-6H-dibenzo[b,d]azepin-6-onyl. In some embodiments, each R¹⁹ and R²⁰ is independently —CH₃. In some embodiments, R¹⁸ is CH₂CF₂CF₃.

[0319] In some embodiments, the compound of formula (IV) is described in a compound described in U.S. Pat. No. 7,160,875, which is herein incorporated by reference in its entirety. In one embodiment, the compound is RO4929097, i.e., (S)-2,2-dimethyl-N1-(6-oxo-6,7-dihydro-5H-dibenzo[b,c]azepin-7-yl)-N3-(2,2,3,3,3-pentafluoropropyl)malonamide, or a pharmaceutically acceptable salt thereof. In one embodiment, the compound is

[chemical structure]

or a pharmaceutically acceptable salt thereof.

[0320] In some embodiments, the compound is a compound of formula (V) or a pharmaceutically acceptable salt thereof;

[chemical structure]

wherein q is 0 or 1; Z represents halogen, —CN, —NO₂, —N₃, —CF₃, —OR^{2a}, —N(R^{2a})₂, —CO₂R^{2a}, —OCOR^{2a}, —COR^{2a}, —CON(R^{2a})₂, OCON(R^{2a})₂, CONR^{2a}(OR^{2a}), —CON(R^{2a})N(R^{2a})₂, CONHC(═NOH)R^{2a}, heterocyclyl, phenyl or heteroaryl, said heterocyclyl, phenyl or heteroaryl bearing 0-3 substituents selected from halogen, —CN, —NO₂, —CF₃, —OR^{2a}, —N(R^{2a})₂, —CO₂R^{2a}, —COR^{2a}, —CON(R^{2a})₂ and C₁₋₄ alkyl; R²⁷ represents H, C₁₋₄ alkyl, or OH; R²⁶ represents H or C₁₋₄ alkyl; with the proviso that when m is 1, R²⁶ and R²⁷ do not both represent C₁₋₄ alkyl; Ar¹ represents C₆₋₁₀ aryl or heteroaryl, either of which bears 0-3 substituents independently selected from halogen, —CN, —NO₂, —CF₃, —OH, —OCF₃, C₁₋₄ alkoxy or C₁₋₄ alkyl which optionally bears a substituent selected from halogen, CN, NO₂, CF₃, OH and C₁₋₄ alkoxy; Ar² represents C₆₋₁₀ aryl or heteroaryl, either of which bears 0-3 substituents independently selected from halogen, —CN, —NO₂, —CF₃, —OH, —OCF₃, C₁₋₄ alkoxy or C₁₋₄ alkyl which optionally bears a substituent selected from halogen, —CN, —NO₂, —CF₃, —OH and C₁₋₄ alkoxy; R^{2a} represents H, C₁₋₆ alkyl, C₃₋₆ cycloalkyl, C₃₋₆ cycloalkyl, C₁₋₆ alkyl, C₂₋₆ alkenyl, any of which optionally bears a substituent selected from halogen, —CN, —NO₂, —CF₃, —OR^{2b}, —CO₂R^{2b}, —N(R^{2b})₂, —CON(R^{2b})₂, Ar and COAr; or R^{2a} represents Ar; or two R^{2a} groups together with a nitrogen atom to which they are mutually attached may complete an N-heterocyclyl group bearing 0-4 substituents independently selected from ═O, ═S, halogen, C₁₋₄ alkyl, —CN, —NO₂, —CF₃, —OH, C₁₋₄alkoxy, C₁₋₄ alkoxycarbonyl, CO₂H, amino, C₁₋₄ alkylamino, di(C₁₋₄ alkyl)amino, carbamoyl, Ar and COAr; R^{2b} represents H, C₁₋₆ alkyl, C₃₋₆ cycloalkyl, C₃₋₆ cycloalkylC₁₋₆ alkyl, C₂₋₆ alkenyl, any of which optionally bears a substituent selected from halogen, —CN, —NO₂, —CF₃, —OH, C₁₋₄ alkoxy, C₁₋₄ alkoxycarbonyl, —CO₂H, amino, C₁₋₄ alkylamino, di(C₁₋₄ alkyl)amino, carbamoyl, Ar and COAr; or R^{2b} represents Ar; or two R^{2b} groups together with a nitrogen atom to which they are mutually attached may complete an N-heterocyclyl group bearing 0-4 substituents independently selected from ═O, ═S, halogen, C₁₋₄ alkyl, —CN, —NO₂, CF₃, —OH, C₁₋₄ alkoxy, C₁₋₄ alkoxycarbonyl, —CO₂H, amino, C₁₋₄ alkylamino, di(C₁₋₄ alkyl)amino, carbamoyl, Ar and COAr; Ar represents phenyl or heteroaryl bearing 0-3 substituents selected from halogen, C₁₋₄ alkyl, —CN, —NO₂, —CF₃, —OH, C₁₋₄ alkoxy, C₁₋₄ alkoxycarbonyl, amino, C₁₋₄ alkylamino, di(C₁₋₄ alkyl)amino, carbamoyl, C₁₋₄ alkylcarbamoyl and di(C₁₋₄ alkyl)carbamoyl.

[0321] In some embodiments, q is 1. In some embodiments, Z is CO₂H. In some embodiments, each of R²⁷ and R²⁶ is independently hydrogen. In some embodiments, Ar¹ is chlorophenyl. In some embodiments, Ar² is difluorophenyl.

[0322] In some embodiments, the compound of formula (V) is described in U.S. Pat. No. 6,984,663, which is herein incorporated by reference in its entirety. In one embodiment, the compound of formula (V) is MK-0752, i.e., 3-((1S,4R)-4-((4-chlorophenyl)sulfonyl)-4-(2,5-difluorophenyl)cyclohexyl)propanoic acid, or a pharmaceutically acceptable salt thereof. In one embodiment, the compound is

[chemical structure]

or a pharmaceutically acceptable salt thereof.

[0323] In some embodiments, the compound is a compound of formula (VI):

[chemical structure]

or a pharmaceutically acceptable salt thereof, wherein A′ is absent or selected from

[chemical structure]

and —S(O)₂—; Z is selected from —CH₂, —CH(OH), —CH(C₁-C₆ alkyl), —CH(C₁-C₆ alkoxy), —CH(NR³³R³⁴), —CH(CH₂(OH)), —CH(CH(C₁-C₄ alkyl)(OH)) and —CH(C(C₁-C₄ alkyl)(C₁-C₄ alkyl)(OH)), for example —CH(C(CH₃)(CH₃)(OH)) or —CH(C(CH₃)(CH₂CH₃)(OH)); R²⁷ is selected from C₁-C₂₀ alkyl, C₂-C₂₀ alkenyl, C₂-C₂₀ alkynyl, C₁-C₂₀ alkoxy, C₂-C₂₀ alkenoxy, C₁-C₂₀ hydroxyalkyl, C₃-C₈ cycloalkyl, benzo(C₃-C₈ cycloalkyl), benzo(C₃-C₈ heterocycloalkyl), C₄-C₈ cycloalkenyl, (C₅-C₁₁)bi- or tricycloalkyl, benzo(C₅-C₁₁)bi- or tricycloalkyl, C₇-C₁₁tricycloalkenyl, (3-8 membered) heterocycloalkyl, C₆-C₁₄ aryl and (5-14 membered) heteroaryl, wherein each hydrogen atom of said alkyl, alkenyl, alkynyl, alkoxy and alkenoxy is optionally independently replaced with halo, and wherein said cycloalkyl, benzo(C₃-C₈ cycloalkyl), cycloalkenyl, (3-8 membered) heterocycloalkyl, C₆-C₁₄ aryl and (5-14 membered) heteroaryl is optionally independently substituted with from one to four substituents independently selected from C₁-C₁₀ alkyl optionally substituted with from one to three halo atoms, C₁-C₁₀ alkoxy optionally substituted with from one to three halo atoms, C₁-C₁₀ hydroxyalkyl, halo, preferably fluorine, —OH, —CN, —NR³³R³⁴, —C(═O)NR³³R³⁴, —C(═O)R³⁵, C₃-C₈ cycloalkyl and (3-8 membered) heterocycloalkyl; R²⁸ is selected from hydrogen, C₁-C₆ alkyl, C₂-C₆ alkenyl, C₃-C₈ cycloalkyl and C₅-C₈ cycloalkenyl, wherein R²⁸ is optionally independently substituted with from one to three substituents independently selected from C₁-C₄ alkyl optionally substituted with from one to three halo atoms, C₁-C₄ alkoxy optionally substituted with from one to three halo atoms, halo and —OH; or R²⁷ and R²⁸ together with the A′ group when present and the nitrogen atom to which R²⁸ is attached, or R²⁷ and R²⁸ together with the nitrogen atom to which R²⁷ and R²⁸ are attached when A′ is absent, may optionally form a four to eight membered ring; R²⁹ is selected from hydrogen, C₁-C₆ alkyl, C₂-C₆ alkenyl, C₂-C₆ alkynyl, C₃-C₆ cycloalkyl, C₅-C₆ cycloalkenyl and (3-8 membered) heterocycloalkyl, wherein said alkyl, alkenyl, alkynyl, cycloalkyl, cycloalkenyl and heterocycloalkyl are each optionally independently substituted with from one to three substituents independently selected from C₁-C₄alkoxy, halo, —OH—S(C₁-C₄)alkyl and (3-8 membered) heterocycloalkyl; R³⁰ is hydrogen, C₁-C₆ alkyl or halo; or R²⁹ and R³⁰ may together with the carbon atom to which they are attached optionally form a moiety selected from cyclopropyl, cyclobutyl, cyclopentyl, cyclohexyl, morpholino, piperidino, pyrrolidino, tetrahydrofuranyl and perhydro-2H-pyran, wherein said moiety formed by R²⁹ and R³⁰ is optionally substituted with from one to three substituents independently selected from C₁-C₆ alkyl optionally substituted with from one to three halo atoms, C₁-C₆ alkoxy optionally substituted with from one to three halo atoms, halo, —OH, —CN and allyl; R³¹ is selected from hydrogen, C₁-C₆ alkyl, C₂-C₆ alkylene, C₁-C₆ alkoxy, halo, —CN, C₃-C₁₂ cycloalkyl, C₄-C₁₂ cycloalkenyl and C₆-C₁₀ aryl, (5-10 membered) heteroaryl, wherein said alkyl, alkylene and alkoxy of R³¹ are each optionally independently substituted with from one to three substituents independently selected from halo and —CN, and wherein said cycloalkyl, cycloalkenyl and aryl and heteroaryl of R³¹ are each optionally independently substituted with from one to three substituents independently selected from C₁-C₄ alkyl optionally substituted with from one to three halo atoms, C₁-C₄ alkoxy optionally substituted with from one to three halo atoms, halo and —CN; R³² is selected from hydrogen, C₁-C₂₀ alkyl, C₁-C₂₀ alkoxy, C₁-C₂₀ hydroxyalkyl, C₃-C₁₂ cycloalkyl, C₄-C₁₂ cycloalkenyl, (C₅-C₂₀) bi- or tricycloalkyl, (C₇-C₂₀)bi- or tricycloalkenyl, (3-12 membered) heterocycloalkyl, (7-20 membered) hetero bi- or heterotricycloalkyl, C₆-C₁₄ aryl and (5-15 membered) heteroaryl, wherein R³² is optionally independently substituted with from one to four substituents independently selected from C₁-C₂₀ alkyl optionally substituted with from one to three halo atoms, C₁-C₂₀ alkoxy, —OH, —CN, —NO₂, —NR³³R³⁴, —C(═O)NR³³R³⁴, —C(═O)R³⁵, —C(═O)OR³⁵, —S(O)—NR³³R³⁴, —S(O)ₙR³⁵, C₃-C₁₂ cycloalkyl, (4-12 membered) heterocycloalkyl optionally substituted with from one to three OH or halo groups, (4-12 membered) heterocycloalkoxy, C₆-C₁₄ aryl, (5-15 membered) heteroaryl, C₆-C₁₂ aryloxy and (5-12 membered) heteroaryloxy; or R³³ and R³⁴ may together with the carbon and nitrogen atoms to which they are respectively attached optionally form a (5-8 membered) heterocycloalkyl ring, a (5-8 membered) heterocycloalkenyl ring or a (6-10 membered) heteroaryl ring, wherein said heterocycloalkyl, heterocycloalkenyl and heteroaryl rings are each optionally independently substituted with from one to three substituents independently selected from halo, C₁-C₆ alkyl, optionally substituted with from one to three halo atoms, C₁-C₆ alkoxy optionally substituted with from one to three halo atoms, C₁-C₆ hydroxyalkyl, —OH, —(CH₂)_{zero-10}NR³³R³⁴, —(CH₂)_{zero-10}C(═O)NR³³R³⁴, —S(O)₂NR³³R³⁴ and C₃-C₁₂ cycloalkyl; R³³ and R³⁴ are each independently selected from hydrogen, C₁-C₁₀ alkyl wherein each hydrogen atom of said C₁-C₁₀ alkyl is optionally independently replaced with a halo atom, preferably a fluorine atom, C₂-C₁₀ alkenyl, C₂-C₁₀ alkynyl, C₁-C₆ alkoxy wherein each hydrogen atom of said C₁-C₆ alkoxy is optionally independently replaced with a halo atom, C₂-C₆ alkenoxy, C₂-C₆ alkynoxy, —C(═O)R11, —S(O)ₙR11, C₃-C₈ cycloalkyl, C₄-C₈ cycloalkenyl, (C₅-C₁₀)bi- or tricycloalkyl, (C₇-C₁₁)bi- or tricycloalkenyl, (3-8 membered) heterocycloalkyl, C₆-C₁₄ aryl and (5-14 membered) heteroaryl, wherein said alkyl and alkoxy are each optionally independently substituted with from one to three substituents independently selected from halo and —OH, and wherein said cycloalkyl, cycloalkenyl, bi- or tricycloalkyl, bi- or tricycloalkenyl, heterocycloalkyl, aryl and heteroaryl are each optionally independently substituted with from one to three substituents independently selected from halo, —OH, C₁-C₆ alkyl optionally independently substituted with from one to six halo atoms, C₂-C₆ alkenyl, C₂-C₆ alkynyl, C₁-C₆ alkoxy, C₂-C₆ alkenoxy, C₂-C₆ alkynoxy and C₁-C₆ hydroxyalkyl; or NR³³R³⁴ may form a (4-7 membered) heterocycloalkyl, wherein said heterocycloalkyl optionally comprises from one to two further heteroatoms independently selected from N, O, and S, and wherein said heterocycloalkyl optionally contains from one to three double bonds, and wherein said heterocycloalkyl is optionally independently substituted with from one to three substituents independently selected from C₁-C₆ alkyl optionally substituted with from one to six halo atoms, C₂-C₆ alkenyl, C₂-C₆ alkynyl, C₁-C₆ alkoxy, C₂-C₆ alkenoxy, C₂-C₆ alkynoxy, C₁-C₆ hydroxyalkyl, C₂-C₆hydroxyalkenyl, C₂-C₆hydroxyalkynyl, halo, —OH, —CN, —NO₂, —C(═O)R³⁵, —C(═O)OR³⁵, —S(O)—R³⁵ and —S(O)—NR³³R³⁴; R³⁵ is selected from H, C₁-C₈ alkyl, C₃-C₈ cycloalkyl, C₄-C₈ cycloalkenyl, (C₅-C₁₁)bi- or tricycloalkyl, —(C₇-C₁₁)bi- or tricycloalkenyl, (3-8 membered) heterocycloalkyl, C₆-C₁₀ aryl and (5-14 membered) heteroaryl, wherein said alkyl of R³⁵ is optionally independently substituted with from one to three substituents independently selected from —OH, —CN and C₃-C₈ cycloalkyl, and wherein each hydrogen atom of said alkyl is optionally independently replaced with a halo atom, preferably a fluorine atom, and wherein said cycloalkyl, cycloalkenyl, heterocycloalkyl, aryl and hetereoaryl of R³⁵ are each optionally independently substituted with from one to three substituents independently selected from halo, C₁-C₈ alkyl optionally substituted with from one to three halo atoms, —OH, —CN and C₃-C₈cycloalkyl; n is in each instance an integer independently selected from zero, 1, 2 and 3; and the pharmaceutically acceptable salts of such compounds.

[0324] In some embodiments, the compound of formula (VI) is described in U.S. Pat. No. 7,795,447, which is herein incorporated by reference in its entirety. In one embodiment, the compound of formula (VI) is PF-3084014, i.e., nirogacestat or (S)-2-(((S)-6,8-difluoro-1,2,3,4-tetrahydronaphthalen-2-yl)amino)-N-(1-(2-methyl-1-(neopentylamino)propan-2-yl)-1H-imidazol-4-yl)pentanamide, or a pharmaceutically acceptable salt thereof.

[0325] In some embodiments, the compound is

[chemical structure]

or a pharmaceutically acceptable salt thereof.

[0326] In some embodiments, the compound is a compound of formula (VII):

[chemical structure]

or a pharmaceutically acceptable salt thereof wherein k is 1, 2, or 3; R³⁶ is aryl C₁-C₈ alkyl, aryl C₂-C₆ alkenyl, or arylalkynyl, wherein the aryl group is substituted with 0-5 occurrences of C₁-C₆ alkyl, C₁-C₆ alkoxy, halogen, haloalkyl, haloalkoxy, heteroaryl, heteroaryl(C₁-C₆)alkoxy, arylalkoxy, aryloxy, C₁-C₆ alkoxycarbonyl, —OCH₂CH₂O—, —OCH₂O—, —C(O)NR⁴³R⁴⁴, —NHR′, —NR′R″, —N(R¹⁶)C(O)R¹⁷, heterocycloalkyl, phenyl, aryl C₁-C₆ alkanoyl, phenylalkoxy, phenyloxy, CN, —SO₂-aryl, —S(O)ₙR²⁵, —(C₁-C₄ alkyl)-S(O)ₓR²⁵, —(C₁-C₄ alkyl)-SO₂-aryl, OH, C₁-C₆ thioalkoxy, C₂-C₆ alkenyl, —OSO₂-aryl, or CO₂H, wherein each heteroaryl is independently substituted with 0-3 occurrences of C₁-C₆ alkyl, heteroaryl substituted with 0-2 occurrences of halogen, alkyl, alkoxy, haloalkyl, haloalkoxy, alkoxyalkyl or CN, C₁-C₆ alkoxy, C₁-C₄ alkoxy C₁-C₄ alkyl, C₃-C₆ cycloalkyl, halogen, or phenyl substituted with 0-5 occurrences of halogen, OH, C₁-C₆ alkyl, C₁-C₄ alkoxy, CF₃, OCF₃, CN, or C₁-C₆ thioalkoxy, wherein each heterocycloalkyl and aryl are independently substituted with 0-2 occurrences of halogen, alkyl, alkoxy, haloalkyl, haloalkoxy, alkoxyalkyl or CN, C₁-C₆ alkyl, C₁-C₆ alkoxy, C₁-C₄ alkoxy C₁-C₄ alkyl, C₃-C₆ cycloalkyl, halogen, or phenyl substituted with 0-5 occurrences of halogen, OH, C₁-C₆ alkyl, C₁-C₄ alkoxy, CF₃, OCF₃, CN, or C₁-C₆ thioalkoxy; R¹⁶ is hydrogen or C₁-C₆ alkyl; R¹⁷ is C₁-C₆ alkyl, aryl, heteroaryl, C₁-C₆ alkoxy, OH, aryloxy, heteroaryloxy, aryl(C₁-C₆)alkoxy, —NR¹⁸R¹⁹, cycloalkyl, or arylalkyl, wherein the cyclic portions of each are independently substituted with 0-5 occurrences of alkyl, alkoxy, halo, haloalkyl, haloalkoxy, CN, NH₂, NH(alkyl), N(alkyl) (alkyl), CO₂H, or C₁-C₆ alkoxycarbonyl; R¹⁸ and R¹⁹ are independently hydrogen, C₁-C₆ alkyl, aryl, heteroaryl, heterocycloalkyl or aryl(C₁-C₆)alkyl, wherein the cyclic portions of each are substituted with 0-3 occurrences of alkyl, alkoxy, halogen, hydroxyl, CF₃, or OCF₃; each R′ is independently hydrogen, C₁-C₆ alkyl, aryl, aryl(C₁-C₄)alkyl, C₁-C₆ alkanoyl, C₃-C₈ cycloalkyl, aryl(C₁-C₆)alkanoyl, heterocycloalkyl, heteroaryl(C₁-C₄)alkyl, —SO₂-alkyl, —SO₂-aryl, —SO₂-heteroaryl, heterocycloalkyl(C₁-C₆)alkanoyl, or heteroaryl(C₁-C₆)alkanoyl, wherein the alkyl portion of the alkyl and alkanoyl groups are optionally substituted with halogen or C₁-C₆ alkoxy and the aryl and heteroaryl groups are optionally substituted with alkyl, alkoxy, halogen, haloalkyl, haloalkoxy; each R″ is independently hydrogen or C₁-C₆ alkyl, wherein the alkyl group is optionally substituted with halogen;

[0327] R³⁶ is C₃-C₇ cycloalkyl(C₁-C₆ alkyl) wherein the cyclic portion is substituted with 0-5 occurrences of halogen, C₁-C₆ alkyl, OH, alkoxycarbonyl, or C₁-C₆ alkoxy; or R³⁶ is C₁-C₁₄ alkyl, C₂-C₁₆ alkenyl, or C₂-C₈ alkynyl, each of which is substituted 0-5 occurrences of OH, halogen, C₁-C₆ alkoxy, aryl, arylalkoxy, aryloxy, heteroaryl, heterocycloalkyl, aryl(C₁-C₆)alkyl, —CO₂(C₁-C₆ alkyl), —NR′R″, C₁-C₆ thioalkoxy, —NHS(O)ₓR²⁵, —N(C₁-C₆ alkyl)-S(O)ₙR²⁵, —S(O)ₓR²⁵, C(O)NR⁴³R⁴⁴, —N(R¹⁶)C(O)NR¹⁶R¹⁷, or —N(R₁₆)C(O)R¹⁷; wherein the above aryl groups are substituted with 0-3 occurrences of OH, C₁-C₆ alkoxy, C₁-C₆ alkyl, or halogen; R⁴³ and R⁴⁴ are independently hydrogen, C₁-C₆ alkyl, aryl, arylalkyl, heteroaryl, heteroarylalkyl, heterocycloalkyl, heterocycloalkylalkyl, arylalkanoyl, alkenyl, cycloalkyl, alkynyl, cycloalkenyl, pyridyl, imidazolyl, thiazolyl, oxazolyl, or indolyl, wherein each alkyl is substituted with 0-3 occurrences of NH₂, NH(C₁-C₆ alkyl), N(C₁-C₆ alkyl) (C₁-C₆ alkyl), OH, C₁-C₆ thioalkoxy, heterocycloalkyl, aryl, heteroaryl, CN, halogen, or alkoxy optionally substituted with OH or phenyl, wherein the aryl, heteroaryl and heterocycloalkyl groups are substituted with 0-3 occurrences of C₁-C₄ alkyl, C₁-C₄ alkoxy, CF₃, OCF₃, OH, halogen, thioalkoxy, phenyl or heteroaryl; or R⁴³, R⁴⁴, and the nitrogen to which they are attached form a heterocycloalkyl ring containing from 3 to 7 ring members, wherein the cyclic portions of R⁴³ and R⁴⁴ or the heterocyclic ring formed from R⁴³, R⁴⁴, and the nitrogen to which they are attached are substituted with 0-3 occurrences of alkyl, alkoxy, halo, OH, thioalkoxy, NH₂, NH(C₁-C₆ alkyl), N(C₁-C₆ alkyl) (C₁-C₆ alkyl), CF₃, OCF₃, phenyl optionally substituted with a halogen, —(C₁-C₄ alkyl)-N(H or C₁-C₄ alkyl)-phenyl, C₁-C₄ hydroxyalkyl, arylalkoxy, arylalkyl, arylalkanoyl, C(O)NH₂, C(O)NH(C₁-C₆ alkyl), C(O)N(C₁-C₆ alkyl) (C₁-C₆ alkyl), heterocycloalkylalkyl, C₁-C₆ alkoxycarbonyl, C₂-C₆ alkanoyl, heteroaryl, or —SO₂(C₁-C₆ alkyl); x is 0, 1, or 2; R²⁵ is C₁-C₆ alkyl, OH, NR²⁶R²⁷; R²⁶ and R²⁷ are independently hydrogen, C₁-C₆ alkyl, phenyl(C₁-C₄ alkyl), aryl, or heteroaryl; or R²⁶, R²⁷ and the nitrogen to which they are attached form a heterocycloalkyl ring;

[0328] R³⁶ is heteroaryl(C₁-C₆)alkyl wherein the cyclic portion is substituted 0-5 occurrences of halogen, C₁-C₆ alkyl, C₁-C₆ alkoxy, C₁-C₄ haloalkyl, C₁-C₄ haloalkoxy, aryl, arylalkyl, aryloxy, heteroaryl, —SO₂-aryl, —S(O)ₓR₂₅, (C₁-C₄ alkyl)-S(O)ₓR₂₅, CN, C₁-C₆ thioalkoxy, C₁-C₆ alkoxycarbonyl, —NR′R″, —C(O)NR′R″, heterocycloalkyl, wherein the above aryl groups are substituted with 0-4 occurrences of halogen, C₁-C₆ alkyl, C₁-C₆ alkoxy, C₁-C₄ haloalkyl, C₁-C₄ haloalkoxy, or CN; wherein the above heteroaryl and heterocycloalkyl groups are substituted with 0-3 occurrences of halogen, CF₃, (C₁-C₄)alkyl, C₁-C₆ thioalkoxy, OH, C₁-C₄ hydroxyalkyl, or C₁-C₄ alkoxy; or

[0329] R³⁶ is heterocycloalkyl(C₁-C₆ alkyl) wherein the cyclic portion is substituted with 0-3 occurrences of halogen, C₁-C₆ alkyl, C₁-C₆ alkoxy, C₁-C₄ haloalkyl, C₁-C₄ haloalkoxy, aryl, arylalkyl, aryloxy, heteroaryl, —SO₂-aryl, —S(O)ₓR²⁵, (C₁-C₄ alkyl)-S(O)ₓR²⁵, CN, C₁-C₆ thioalkoxy, C₁-C₆ alkoxycarbonyl, —NR′R″, —C(O)NR′R″, heterocycloalkyl;

[0330] R³⁷ is hydrogen, C₁-C₆ alkyl, or phenyl(C₁-C₄)alkyl; R³⁸ is hydrogen, halogen, C₁-C₆ alkyl, C₁-C₆ alkoxy, C₁-C₆ haloalkyl, CN; R³⁹ is hydrogen, halogen, C₁-C₆ alkyl optionally substituted with —CO₂—(C₁-C₆ alkyl), C₁-C₆ alkoxy, C₁-C₆ haloalkyl, C₁-C₆ haloalkoxy, CN, aryloxy, isocyanato, —SO₂(C₁-C₆ alkyl), —NHR′, —NR′R″, C₁-C₆ alkanoyl, heteroaryl, aryl; or R³⁸ and R³⁹ and the carbons to which they are attached form a heterocycloalkyl ring which is substituted with 0-3 occurrences of C₁-C₄ alkyl, C₁-C₄ alkoxy, halogen, or C₁-C₄ alkanoyl wherein the alkanoyl group is substituted with 0-3 halogen atoms; R⁴⁰ is hydrogen, —SO₂NR′R″, halogen; or R³⁹ and R⁴⁰ and the carbons to which they are attached form a benzo ring; or R³⁹ and R⁴⁰ and the carbons to which they are attached form a 1-oxa-2,3-diazacyclopentyl ring; R⁴⁰ and R⁴¹ are independently hydrogen or F; or R⁴⁰, R⁴¹, and the carbons to which they are attached for a 1,2,5-oxadiazolyl ring; or R⁴⁰, R⁴¹, and the carbons to which they are attached form a naphthyl ring.

[0331] In some embodiments, R³⁶ is 4-bromobenzyl. In some embodiments, R³⁷ is hydrogen. In some embodiments, k is 2. In some embodiments, each of R³⁸, R⁴⁰, R⁴¹, and R⁴² is independently hydrogen. In some embodiments, R³⁹ is chloro.

[0332] In some embodiments, the compound of formula (VI) is described in U.S. Pat. No. 7,939,657, which is herein incorporated by reference in its entirety. In one embodiment, the compound of formula (VI) is ELN-318463, i.e., HY-50882 or (R)—N-(4-bromobenzyl)-4-chloro-N-(2-oxoazepan-3-yl)benzenesulfonamide, or a pharmaceutically acceptable salt thereof. In some embodiments, the compound is

[chemical structure]

or a pharmaceutically acceptable salt thereof.

[0333] In some embodiments, the compound is a compound of formula (VII):

[chemical structure]

or a pharmaceutically acceptable salt thereof, wherein R₁ is —CH₂CF₃ or —CH₂CH₂CF₃; R₂ is —CH₂CF₃, —CH₂CH₂CF₃, or —CH₂CH₂CH₂CF₃; R₃ is hydrogen or —CH₃; each Rₐ is independently F, CI, —CN, —OCH₃, and/or —NHCH₂CH₂OCH₃; and z is 0, 1, or 2.

[0334] In some embodiments, R₁ is —CH₂CH₂CF₃CH₂CH₂CF₃. In some embodiments, R₂—CH₂CH₂CF₃. In some embodiments, R₃ is —CH₃. In some embodiments, z is 0.

[0335] In some embodiments, the compound of formula (VII) is described in U.S. Pat. No. 8,629,136, which is herein incorporated by reference in its entirety. In one embodiment, the compound of formula (VII) is BMS-906024, i.e., (2R,3S)—N-[(3S)-1-methyl-2-oxo-5-phenyl-2,3-dihydro-1H-1,4-benzodiazepin-3-yl]-2,3-bis(3,3,3-trifluoropropyl)succinamide, or a pharmaceutically acceptable salt thereof. In one embodiment, the compound is

[chemical structure]

or a pharmaceutically acceptable salt thereof.

[0336] In some embodiments, the compound is described in U.S. Pat. No. 8,629,136, which is herein incorporated by reference in its entirety. In one embodiment, the compound is LY3039478, i.e., crenigacestat or 4,4,4-trifluoro-N—((R)-1-(((S)-5-(2-hydroxyethyl)-6-oxo-6,7-dihydro-5H-benzo[d]pyrido[2,3-b]azepin-7-yl)amino)-1-oxopropan-2-yl)butanamide, or a pharmaceutically acceptable salt thereof. In some embodiments, the compound is:

[chemical structure]

or a pharmaceutically acceptable salt thereof.

[0337] In some embodiments, the compound is BMS-299897, i.e., 2-[(1R)-1-[[(4-chlorophenyl)sulfonyl](2,5-difluorophenyl)amino]ethyl-5-fluorobenzenebutanoic acid or a pharmaceutically acceptable salt thereof. In some embodiments, the compound is

[chemical structure]

or a pharmaceutically acceptable salt thereof.

[0338] In some embodiments, the compound is LY-411575, i.e., LSN-411575, (S)-2-((S)-2-(3,5-difluorophenyl)-2-hydroxyacetamido)-N—((S)-5-methyl-6-oxo-6,7-dihydro-5H-dibenzo[b,c]azepin-7-yl)propanamide, or a pharmaceutically acceptable salt thereof. In some embodiments, the compound is

[chemical structure]

or a pharmaceutically acceptable salt thereof.

[0339] In some embodiments, the compound is DAPT, i.e., N-[(3,5-difluorophenyl)acetyl]-L-alanyl-2-phenyl]glycine-1,1-dimethylethyl ester or a pharmaceutically acceptable salt thereof. In some embodiments, the compound is

[chemical structure]

or a pharmaceutically acceptable salt thereof.

[0340] In some embodiments, the compound is a compound of the following formulae:

[chemical structure]

wherein, z1 is 0, 1 or 2; X¹ is C(R³) or N; R¹ is hydrogen, halogen, —N₃, —CF₃, —CCl₃, —CBr₃, —CI₃, —CN, —CHO, —OR^{1A}, NR^{1A}R^{1B}, COOR^{1A}, —C(O)NR^{1A}R^{1B}, NO₂, —SR^{1A}, —S(O)ₙ₁OR^{1A}, —S(O)ₙ₁NR^{1A}R^{1B}, —NHNR^{1A}R^{1B}, —ONR^{1A}R^{1B}, —NHC(O)NHNR^{1A}R^{1B}, substituted or unsubstituted alkyl, substituted or unsubstituted heteroalkyl, substituted or unsubstituted cycloalkyl, substituted or unsubstituted heterocycloalkyl, substituted or unsubstituted aryl, or substituted or unsubstituted heteroaryl; R² is hydrogen, halogen, —N₃, —CF₃, —CCl₃, —CBr₃, —CI₃, —CN, —CHO, —OR^{2A}, —NR^{2A}R^{2B}, —COOR^{2A}, —C(O)NR^{2A}R^{2B}, —NO₂, —SR^{2A}, —S(O)ₙ₂R^{2A}, —S(O)ₙ₂OR^{2A}, —S(O)ₙ₂NR^{2A}R^{2B}, —NHNR^{2A}R^{2B}, —ONR^{2A}R^{2B}, —NHC(O)NHNR^{2A}R^{2B}, substituted or unsubstituted alkyl, substituted or unsubstituted heteroalkyl, substituted or unsubstituted cycloalkyl, substituted or unsubstituted heterocycloalkyl, substituted or unsubstituted aryl, or substituted or unsubstituted heteroaryl; R³ is hydrogen, halogen, —N₃, —CF₃, —CCl₃, —CBr₃, —CI₃, —CN, —CHO, —OR^{3A}, —NR^{3A}R^{3B}, —COOR^{3A}, —C(O)NR^{3A}R^{3B}, —NO₂, —SR^{3A}, —S(O)ₙ₃R^{3A}, —S(O)ₙ₃OR^{3A}, —S(O)ₙ₃ONR^{3A}R^{3B}, —NHNR^{3A}R^{3B}, —ONR^{3A}R^{3B}, —NHC(O)NHNR^{3A}R^{3B}, substituted or unsubstituted alkyl, substituted or unsubstituted heteroalkyl, substituted or unsubstituted cycloalkyl, substituted or unsubstituted heterocycloalkyl, substituted or unsubstituted aryl, or substituted or unsubstituted heteroaryl; R⁴ is hydrogen, halogen, —N₃, —CF₃, —CCl₃, —CBr₃, —CI₃, —CN, —CHO, —OR^{4A}, —NR^{4A}R^{4B}, —COOR^{4A}, —C(O)NR^{4A}R^{4B}, —NO₂, —SR^{4A}, —S(O)ₙ₄R^{4A}, —S(O)ₙ₄OR^{4A}, —S(O)ₙ₄NR^{4A}R^{4B}, —NHNR^{4A}R_{4B}, —ONR^{4A}R^{4B}, —NHC(O)NHNR^{4A}R^{4B}, substituted or unsubstituted alkyl, substituted or unsubstituted heteroalkyl, substituted or unsubstituted cycloalkyl, substituted or unsubstituted heterocycloalkyl, substituted or unsubstituted aryl, or substituted or unsubstituted heteroaryl; R⁵ is hydrogen, halogen, —N₃, —CF₃, —CCl₃, —CBr₃, —CI₃, —CN, —CHO, —OR^{5A}, —NR^{5A}R^{5B}, —COOR^{5A}, —C(O)NR^{5A}R^{5B}, —NO₂, —SR^{5A}, —S(O)ₙ₅R^{5A}, —S(O)ₙ₅OR^{5A}, —S(O)ₙ₅NR^{5A}R^{5B}, —NHNR^{5A}R^{5B}, —ONR^{5A}R^{5B}, —NHC(O)NHNR^{5A}R^{5B}, substituted or unsubstituted alkyl, substituted or unsubstituted heteroalkyl, substituted or unsubstituted cycloalkyl, substituted or unsubstituted heterocycloalkyl, substituted or unsubstituted aryl, or substituted or unsubstituted heteroaryl, wherein R⁴ and R⁵ are optionally joined together to form a substituted or unsubstituted heterocycloalkyl, or substituted or unsubstituted heteroaryl; R⁶ is —CF₃, substituted or unsubstituted cyclopropyl, or substituted or unsubstituted cyclobutyl; R⁷ is independently hydrogen, halogen, —N₃, —CF₃, —CCl₃, —CBr₃, —CI₃, —CN, —CHO, —OR^{7A}, —NR^{7A}R^{7B}, —COOR^{7A}, —C(O)NR^{7A}R^{7B}, —NO₂, —SR^{7A}, —S(O)ₙ₇R^{7A}, —S(O)ₙ₇OR^{7A}, —S(O)ₙ₇NR^{7A}R^{7B}, —NHNR^{7A}R^{7B}, —ONR^{7A}R^{7B}, —NHC(O)NHNR^{7A}R^{7B}, substituted or unsubstituted alkyl, substituted or unsubstituted heteroalkyl, substituted or unsubstituted cycloalkyl, substituted or unsubstituted heterocycloalkyl, substituted or unsubstituted aryl, or substituted or unsubstituted heteroaryl; R^{1A}, R^{1B}, R^{2A}, R^{2B}, R^{3A}, R^{3B}, R^{4A}, R^{4B}, R^{5A}, R^{5B}, R^{7A} and R^{7B} are independently hydrogen, substituted or unsubstituted alkyl, substituted or unsubstituted heteroalkyl, substituted or unsubstituted cycloalkyl, substituted or unsubstituted heterocycloalkyl, substituted or unsubstituted aryl, or substituted or unsubstituted heteroaryl; and n1, n2, n3, n4, n5 and n7 are independently 1 or 2.

[0341] In some embodiments, the compound of formulae (VIII-a), (VIII-b), (VIII-c), or (VIII-d) is described in International Patent Publication No. WO 2014/165263 (e.g., in embodiments P1-P12), which is herein incorporated by reference in its entirety. In some embodiments, the compound of formulae (VIII-a), (VIII-b), (VIII-c), or (VIII-d) is selected from:

[chemical structure]

[chemical structure]

or a pharmaceutically acceptable salt thereof.

[0342] In some embodiments, the compound is a compound of formula (IX):

[chemical structure]

or a pharmaceutically acceptable salt thereof, wherein A is a 4 to 7 membered spirocyclic ring comprising at least one heteroatom selected from the group consisting of N, O, S, S(O)₂, P(O)R¹, and N—S(O)₂—R¹, wherein the spirocyclic ring is optionally substituted with 1 to 3 substituents selected from the group consisting of C1-3alkyl and ═O; R¹ is C1-6alkyl optionally substituted with halo; each L¹ is independently selected from the group consisting of 1) C1-3alkyl optionally substituted with halo, and 2) halo; each L² is independently selected from the group consisting of 1) C1-3alkyl optionally substituted with halo, and 2) halo; and n is 0 to 3.

[0343] In some embodiments, the compound of formulae (IX) is described in U.S. Patent Publication No. US-2015-307533 (e.g., in the Table on pages 13-16), which is herein incorporated by reference in its entirety. In some embodiments, the compound of formula (IX) is selected from:

[chemical structure]

or a pharmaceutically acceptable salt thereof.

[0344] In some embodiments, the compound is a compound of formula (X):

[chemical structure]

or a pharmaceutically acceptable salt thereof, wherein R¹ is hydroxy or fluoro; R² is C₁-C₄ alkyl; R³ is hydrogen or phenyl; R⁴ is hydrogen, phenyl, or C₁-C₄ alkyl; R⁵ is hydrogen or phenyl; provided that one of R³, R⁴, and R⁵ is other than hydrogen and the other two are hydrogen.

[0345] In some embodiments, the compound of formula (X) is described in U.S. Pat. No. 8,188,069, which is herein incorporated by reference in its entirety. In one embodiment, the compound is

[chemical structure]

or a pharmaceutically acceptable salt thereof.

[0346] In some embodiments, the compound is a compound of formula (XI):

[chemical structure]

or a pharmaceutically acceptable salt thereof, wherein: R¹ is 1) hydrogen, 2) (C1-C6)alkyl optionally substituted with 1 to 5 halogens or phenyl, wherein the phenyl is optionally substituted with 1 to 3 halogens, 3) phenyl optionally substituted with 1 to 3 (C1-C6)alkyls or 1 to 5 halogens, or 4) (C4-C6)cycloalkyl optionally substituted with 1 to 3 (C1-C6)alkyls or 1 to 5 halogens; R² is 1) hydrogen, 2) (C1-C6)alkyl optionally substituted with 1 to 5 halogens or phenyl, wherein the phenyl is optionally substituted with 1 to 3 halogens, or 3) phenyl optionally substituted with 1 to 3 halogens; R³ is (C1-C6)alkyl, —OH or halogen;
X is —NR⁴—, —O—, —S—, or —SO₂—; R⁴ is hydrogen or (C1-C3)alkyl;
p is 1 to 3; m is 0 or 1; n is 0 to 3; and Ar²—Ar¹ is selected from the group consisting of:

[chemical structure]

or a pharmaceutically acceptable salt thereof.

[0347] In some embodiments, the compound of formula (XI) is described in U.S. Pat. No. 9,096,582 (e.g., in the Table on pages 13-17), which is herein incorporated by reference in its entirety. In some embodiments, the compound of formula (XI) is selected from:

[chemical structure]

or a pharmaceutically acceptable salt thereof.

[0348] In some embodiments, the compound is a compound of formula (XII):

[chemical structure]

or a pharmaceutically acceptable salt thereof, wherein or the pharmaceutically acceptable salts thereof, wherein: R¹, R², R³, R⁸, R⁹, R¹⁰, and W are independently selected; W is selected from the group consisting of; —S(O)—, and —S(O)₂—; R¹ is selected from the group consisting of H, alkyl-, alkenyl-, alkynyl-, aryl-, arylalkyl-, alkylaryl-, cycloalkyl-, cycloalkenyl, cycloalkylalkyl-, fused benzocycloalkyl (i.e., benzofusedcycloalkyl), fused benzoheterocycloalkyl (i.e., benzofusedheterocycloalkyl), fused heteroarylcycloalkyl (i.e., heteroarylfusedcycloalkyl), fused heteroarylheterocycloalkyl (i.e., heteroarylfused-heterocycloalkyl), heteroaryl-, heteroarylalkyl-, heterocyclyl-, heterocyclenyl, -and heterocyclyalkyl-; wherein each of said alkyl-, alkenyl- and alkynyl-, aryl-, arylalkyl-, alkylaryl-, cycloalkyl-, cycloalkenyl-, cycloalkylalkyl-, fused benzocycloalkyl, fused benzoheterocycloalkyl, fused heteroarylcycloalkyl, fused heteroarylheterocycloalkyl, heteroaryl-, heteroarylalkyl-, heterocyclyl-, heterocyclenyl and heterocyclyalkyl-R¹ groups is optionally substituted with 1-5 independently selected R²¹ groups; R² and R³ are each independently selected from the group consisting of H, alkyl-, alkenyl-, alkynyl-, aryl-, arylalkyl-, alkylaryl-, cycloalkyl-, cycloalkenyl-, cycloalkylalkyl-, heteroaryl-, heteroarylalkyl-, heterocyclyl-, heterocyclenyl-, and heterocyclyalkyl-; wherein each of said alkyl-, alkenyl- and alkynyl-, aryl-, arylalkyl-, alkylaryl-, cycloalkyl-, cycloalkenyl, cycloalkylalkyl-, cycloalkenyl-, heteroaryl-, heteroarylalkyl-, heterocyclyl-, heterocyclenyl- and heterocyclyalkyl-R¹ groups is optionally substituted with 1-5 independently selected R²¹ groups; or R² and R³ taken together, along with the atoms to which they are bound, form a ring selected from the group consisting of: (a) a 5 to 6 membered heterocycloalkyl ring, said heterocycloalkyl ring optionally comprising, in addition to W and in addition to the N adjacent to W, at least one other heteroatom independently selected from the group consisting of: —O—, —S(O)—, —S(O)₂, and —C(O)—, and (b) a 5 to 6 membered heterocycloalkenyl ring, said heterocycloalkenyl ring optionally comprising, in addition to W and in addition to the N adjacent to W, at least one other heteroatom independently selected from the group consisting of: —O—, —S(O)—, —S(O)₂, and —C(O)—; wherein said ring is optionally substituted with 1-5 independently selected R²¹ groups; or R² and R³ taken together along with the atoms to which they are bound, and R¹ and R³ are taken together along with the atoms to which they are bound, form the fused ring moiety:

[chemical structure]

wherein Ring A is a ring selected from the group consisting of: (a) a 5 to 6 membered heterocycloalkyl ring, said heterocycloalkyl ring optionally comprising, in addition to W and in addition to the N adjacent to W, at least one other heteroatom independently selected from the group consisting of: —O—, —NR¹⁴—, —S(O)—, —S(O)₂, and —C(O)—, and (b) a 5 to 6 membered heterocycloalkenyl ring, said heterocycloalkenyl ring optionally comprising, in addition to W and in addition to the N adjacent to W, at least one other heteroatom independently selected from the group consisting of: —O—, —NR¹⁴—, —S(O)—, —S(O)₂, and —C(O)—, and wherein said fused ring moiety is optionally substituted with 1-5 independently selected R²¹ groups; or R¹ and R³ taken together with the atoms to which they are bound form a fused benzoheterocycloalkyl ring, and wherein said fused ring is optionally substituted with 1-5 independently selected R²¹ groups, R⁸ is selected from the group consisting of H, alkyl-, alkenyl-, alkynyl-, aryl-, arylalkyl-, alkylaryl-, cycloalkyl-, cycloalkenyl, cycloalkylalkyl-, heteroaryl-, heteroarylalkyl-, heterocyclyl-, heterocyclenyl- and heterocyclyalkyl-; wherein each of said R⁸ alkyl-, alkenyl- and alkynyl-, aryl-, arylalkyl-, alkylaryl-, cycloalkyl-, cycloalkenyl, cycloalkylalkyl-, heteroaryl-, heteroarylalkyl-, heterocyclyl, heterocyclenyl- and heterocyclyalkyl- is optionally substituted with 1-3 independently selected R²¹ groups; R⁹ is selected from the group consisting of: alkyl-, alkenyl-, alkynyl-, aryl-, arylalkyl-, alkylaryl-, cycloalkyl-, cycloalkenyl, cycloalkylalkyl, heteroaryl-, heteroarylalkyl-, heterocyclyl-, heterocyclenyl-, and heterocyclyalkyl-, wherein each of said R⁹ alkyl-, alkenyl- and alkynyl-, aryl-, arylalkyl-, alkylaryl-, cycloalkyl-, cycloalkenyl, cycloalkyl alkyl-, heteroaryl-, heteroarylalkyl-, heterocyclyl-, heterocyclenyl-, heterocyclyalkyl- and heterocyclyalkyl- is optionally substituted with 1-3 independently selected R²¹ groups;
R¹⁰ is selected from the group consisting of: a bond, alkyl-, alkenyl-, alkynyl-, aryl-, arylalkyl-, alkylaryl-, cycloalkyl-, cycloalkenyl, cycloalkylalkyl-, heteroaryl-, heteroarylalkyl-, heterocyclyl-, heterocyclenyl-, heterocyclyalkyl-, heterocyclyalkenyl-,

[chemical structure]

wherein X is selected from the group consisting of: O, —N(R¹⁴)— or —S—; and wherein each of said R¹⁰ moieties is optionally substituted with 1-3 independently selected R²¹ groups; R¹⁴ is selected from the group consisting of H, alkyl, alkenyl, alkynyl, cycloalkyl, cycloalkylalkyl, cycloalkenyl, heterocyclyl, heterocyclenyl, heterocyclylalkyl, heterocyclyalkenyl-, aryl, arylalkyl, heteroaryl, heteroarylalkyl, —ON, —C(O)R¹⁵, —C(O)OR¹⁵, —C(O)N(R¹⁵)(R¹⁶), —S(O)N(R¹⁵)(R¹⁶), —S(O)₂N(R¹⁵)(R¹⁶), —C(═NOR¹⁵)R¹⁶, and —P(O)(OR¹⁵)(OR¹⁶); R¹⁵, R¹⁶ and R¹⁷ are independently selected from the group consisting of H, alkyl, alkenyl, alkynyl, cycloalkyl, cycloalkylalkyl, heterocyclyl, heterocyclylalkyl, aryl, arylalkyl, heteroaryl, heteroarylalkyl, arylcycloalkyl, arylheterocyclyl, (R¹⁸)ₙ-alkyl, (R¹⁸)ₙ-cycloalkyl, (R¹⁸)ₙ-cycloalkylalkyl, (R¹⁸)ₙ-heterocyclyl, (R¹⁸)ₙ-heterocyclylalkyl, (R¹⁸)ₙ-aryl, (R¹⁸)_{c}arylalkyl, (R¹⁸)_{c}heteroaryl and (R¹⁸)_{c}heteroarylalkyl; each R¹⁸ is independently selected from the group consisting of alkyl, alkenyl, alkynyl, aryl, arylalkyl, arylalkenyl, arylalkynyl, —NO₂, halo, heteroaryl, HO-alkyoxyalkyl, —CF₃, —CN, alkyl-CN, —C(O)R¹⁹, —C(O)OH, —C(O)OR¹⁹, —C(O)NHR²⁰, —C(O)NH₂, —C(O)NH₂—C(O)N(alkyl)₂, —C(O)N(alkyl)(aryl), —C(O)N(alkyl)(heteroaryl), —SR¹⁹, —S(O)₂R²⁰, —S(O)NH₂, —S(O)NH(alkyl), —S(O)N(alkyl)(alkyl), —S(O)NH(aryl), —S(O)₂NH₂, —S(O)₂NHR¹⁹, —S(O)₂NH(heterocyclyl), —S(O)₂N(alkyl)₂, —S(O)₂N(alkyl)(aryl), —OCF₃, —OH, —OR²⁰, —O-heterocyclyl, —O— cycloalkylalkyl, —O-heterocyclylalkyl, —NH₂, —NHR²⁰, —N(alkyl)₂, —N(arylalkyl)₂, —N(arylalkyl)-(heteroarylalkyl), —NHC(O)R²⁰, —NHC(O)NH₂, —NHC(O)NH(alkyl), —NHC(O)N(alkyl)(alkyl), —N(alkyl)C(O)NH(alkyl), —N(alkyl)C(O)N(alkyl)(alkyl), —NHS(O)₂R²⁰, —NHS(O)₂NH(alkyl), —NHS(O)₂N(alkyl)(alkyl), —N(alkyl)S(O)₂NH(alkyl) and —N(alkyl)S(O)₂N(alkyl)(alkyl); or two emoieties on adjacent carbons can be linked together to form a

[chemical structure]

R¹⁹ is selected from the group consisting of: alkyl, cycloalkyl, aryl, arylalkyl and heteroarylalkyl; R²⁰ is selected from the group consisting of: alkyl, cycloalkyl, aryl, halo substituted aryl, arylalkyl, heteroaryl and heteroarylalkyl; each R²¹ is independently selected from the group consisting of: alkyl, alkenyl, alkynyl, cycloalkyl, cycloalkylalkyl, cycloalkenyl, heterocycloalkyl, heterocycloalkylalkyl, aryl, arylalkyl, heteroaryl, heteroarylalkyl, halo, —ON, —OR¹⁵, —C(O)R¹⁵, —C(O)OR¹⁵, —C(O)N(R¹⁵)(R¹⁶), —SR¹⁵, —S(O)N(R¹⁶)(R¹⁶), —CH(R¹⁵)(R¹⁶), —S(O)₂N(R¹⁶)(R¹⁶), —C(═NOR¹⁶)R¹⁶, —P(O)(OR¹⁵)(OR¹⁶), —N(R¹⁵)(R¹⁶), -alkyl-N(R¹⁵)(R¹⁶), —N(R¹⁵)C(O)R¹⁶, —CH₂—N(R¹⁵)C(O)R¹⁶, —CH₂—N(R¹⁵)C(O)N(R¹⁶)(R¹⁷), —OH₂—R¹⁵; —CH₂N(R¹⁵)(R¹⁶), —N(R¹⁵)S(O)R¹⁶, —N(R¹⁵)S(O)₂R¹⁶, —CH₂—N(R¹⁵)S(O)₂R¹⁶, —N(R¹⁵)S(O)₂N(R¹⁶)(R¹⁷), —N(R¹⁵)S(O)N(R¹⁶)(R¹⁷), —N(R¹⁵)C(O)N(R¹⁶)(R¹⁷), —CH₂—N(R¹⁵)C(O)N(R¹⁶)(R¹⁷), —N(R¹⁵)C(O)OR¹⁶, —CH₂—N(R¹⁵)C(O)OR¹⁶, —S(O)R¹⁵, ═NOR¹⁵, —N₃, —NO₂ and —S(O)₂R¹⁵; wherein each of said alkyl, alkenyl, alkynyl, cycloalkyl, cycloalkylalkyl, cycloalkenyl, heterocycloalkyl, heterocycloalkylalkyl, aryl, arylalkyl, heteroaryl, and heteroarylalkyl R²¹ groups is optionally substituted with 1 to 5 independently selected R²² groups; and each R²² group is independently selected from the group consisting of alkyl, cycloalkyl, cycloalkenyl, heterocycloalkyl, aryl, heteroaryl, halo, —CF₃, —CN, —OR¹⁵, —C(O)R¹⁵, —C(O)OR¹⁵, -alkyl-C(O)OR¹⁵, C(O)N(R¹⁵)(R¹⁶), —SR¹⁵, —S(O)N(R¹⁵)(R¹⁶), —S(O)₂N(R¹⁵)(R¹⁶), —C(═NOR¹⁵)R¹⁶, —P(O)(OR¹⁵)(OR¹⁶), —N(R¹⁵)(R¹⁶), -alkyl-N(R¹⁵)(R¹⁶), —N(R¹⁵)C(O)R¹⁶, —CH₂—N(R¹⁵)C(O)R¹⁶, —N(R¹⁵)S(O)R¹⁶, —N(R¹⁵)S(O)₂R¹⁶, —CH₂—N(R¹⁵)S(O)₂R¹⁶, —N(R¹⁵)S(O)₂N(R¹⁶)(R¹⁷), —N(R¹⁵)S(O)N(R¹⁶)(R¹⁷), —N(R¹⁵)C(O)N(R¹⁶)(R¹⁷), —CH₂—N(R¹⁵)C(O)N(R¹⁶)(R¹⁷); —N(R¹⁵)C(O)OR¹⁶, —CH₂—N(R¹⁵)C(O)OR¹⁶, —N₃, ═NOR¹⁵, —NO₂, —S(O)R¹⁵ and —S(O)₂R¹⁵.

[0349] In some embodiments, the compound of formula (XII) is described in U.S. Patent Publication No. US-2011-0257163 (e.g., in paragraphs [0506] to [0553]), which is herein incorporated by reference in its entirety. In some embodiments, the compound of formula (XII) is a pharmaceutically acceptable ester. In some embodiments, the compound of formula (XII) is selected from:

[chemical structure]

[chemical structure]

or a pharmaceutically acceptable salt thereof.

[0350] In some embodiments, the compound is a compound of formula (XIII):

[chemical structure]

or a pharmaceutically acceptable salt thereof, wherein the A-ring is aryl, cycloalkyl, heteroaryl or heterocycloalkyl, where each ring is optionally substituted at a substitutable position with halogen, C₁-C₆ alkyl, C₂-C₆ alkenyl, C₂-C₆ alkynyl, C₁-C₆ alkoxy, haloalkyl, haloalkoxy, hydroxyl, hydroxyalkyl, CN, phenoxy, —S(O)₀₋₂—(C₁-C₆ alkyl), —NR₁₀R₁₁, C₁-C₆ alkanoyl, C₀-C₃alkylCO₂R′, heteroaryl, heterocycloalkyl, aryl, aralkyl, or —SO₂NR₁₀R₁₁; R₁ and R₂ combine to form a [3.3.1] or a [3.2.1] ring system, where 0 or 1 of the carbons in the ring system is optionally replaced with an —O—, —S(O)ₓ—, or —NR₁₅— group; and where the [3.3.1] or [3.2.1] ring system is optionally substituted with 1, 2, 3, or 4 groups that are independently oxo, halogen, C₁-C₆ alkyl, —O(C₁-C₂ alkyl)O—, —S(C₁-C₂ alkyl)S—, C₂-C₆ alkenyl, C₁-C₆ haloalkyl, C₂-C₆ alkynyl, hydroxy, hydroxyalkyl, C₁-C₆ alkoxy, haloalkoxy, —C(O)OR₁₃, —(C₁-C₄ alkyl)-C(O)OR₁₆, —CONR₁₀R₁₁, —OC(O)NR₁₀R₁₁, —NR′C(O)OR″, —NR′S(O)₂R″, —OS(O)₂R′, —NR′COR″, CN, ═N—NR₁₂, or ═N—O—R₁₃; where x is 0, 1, or 2; R₁₀ and R₁₁ at each occurrence are independently hydrogen or C₁-C₆ alkyl, where the alkyl is optionally substituted with an aryl, where the aryl is optionally substituted with 1 to 5 groups that are independently halogen, hydroxyl, alkyl, alkoxy, haloalkyl, haloalkoxy, CN or NO₂; or R₁₀ and R₁₁ together may form a 3-8 membered ring optionally including an additional heteroatom such as N, O or S; R₁₂ is hydrogen, C₁-C₆ alkyl or —SO₂-aryl, where the aryl is optionally substituted with 1 to 5 groups that are independently halogen, hydroxyl, alkyl, alkoxy, haloalkyl, haloalkoxy, CN or NO₂; R₁₃ is hydrogen or C₁-C₆ alkyl optionally substituted with aryl, hydroxyl, or halogen, where the aryl is optionally substituted with 1 to 5 groups that are independently halogen, hydroxyl, alkyl, alkoxy, haloalkyl, haloalkoxy, CN or NO₂;
R₁₅ is hydrogen, aryl, heteroaryl, —SO₂R′, —C(O)R′, —C(O)OR′, or C₁-C₆ alkyl optionally substituted with aryl, hydroxyl, or halogen, where the aryl groups are optionally substituted with 1 to 5 groups that are independently halogen, hydroxyl, alkyl, alkoxy, haloalkyl, haloalkoxy, CN or NO₂; and R′ and R″ are independently hydrogen, C₁-C₆ alkyl, haloalkyl, C₂-C₆ alkenyl or phenyl optionally substituted with 1 to 5 groups that are independently halogen, C₁-C₆ alkyl, —C(O)OR′, C₁-C₆ alkoxy, haloalkyl, haloalkoxy, hydroxyl, CN, phenoxy, —SO₂—(C₁-C₆ alkyl), —NR₁₀R₁₁, C₁-C₆ alkanoyl, pyridyl, phenyl, NO₂, or —SO₂NR₁₀R₁₁.

[0351] In some embodiments, the compound of formula (XIII) is described in U.S. Patent Publication No. US-2011-178199 (e.g., in paragraphs [0798] to [0799] and Tables 1-4), which is herein incorporated by reference in its entirety. In some embodiments, the compound of formula (XIII) comprises a bridged n-bicyclic sulfonamide or a pharmaceutically acceptable salt thereof. In some embodiments, the compound of formula (XIII) is selected from:

[chemical structure]

or a pharmaceutically acceptable salt thereof.

[0352] In some embodiments, the compound is a compound of formula (XIV):

[chemical structure]

or a pharmaceutically acceptable salt thereof, wherein R is selected from the group consisting of: (1) -pyridinyl, (2) -pyrazolinyl, (3) -1,2,4-oxadiazolyl, (4) —(C1-C2)alkyl-pyridinyl, (5) —(C1-C2)alkyl-pyrazolinyl, and (6) —(C1-C2)alkyl-1,2,4-oxadiazolyl, wherein the pyridinyl, pyrazolinyl, and -1,2,4-oxadiazolyl, is unsubstituted or substituted with one L¹ group; R¹ is independently selected from the group consisting halogen, (C1-C6)alkyl, —CN, —CF₃, —O—(C1-C6)alkyl, —O-(halo(C1-C6)alkyl), —C(O)—O—(C1-C6)-OH-substituted (C1-C4)alkyl, halo(C1-C6)alkyl, —(C1-C4)alkoxy-OH, —(C1-C4)alkoxy(C1-C4)alkoxy and —S(O)₂(C1-C6)alkyl; n is 0, 1, 2, or 3; Ar is selected from the group consisting of phenyl optionally substituted with 1 or 2 L² groups, and pyridyl optionally substituted with 1 or 2 L² groups;

[0353] L¹ is independently selected from the group consisting of —OCH₃, —NH₂, ═O and (C1-C5)alkyl; and L² is independently selected from the group consisting of halogen, (C1-C6)alkyl, —CN, —CF₃, —O—(C1-C6) alkyl, —O-(halo(C1-C6) alkyl), —C(O)—O—(C1-C6)alkyl, —OH-substituted(C1-C6)alkyl, halo(C1-C6)alkyl, —OH-substituted (C1-C4)alkoxy, —(C1-C4)alkoxy(C1-C4)alkoxy and —S(O)₂(C1-C6)alkyl.

[0354] In some embodiments, the compound of formula (XIV) is described in U.S. Pat. No. 9,226,927 (e.g., compound 4, 8a, 8b, 11, 14, 25a, 25b, 25c, 25d, 25e, 25f, 25g, 25h, 27a, or 27b), which is herein incorporated by reference in its entirety. In some embodiments, the compound of formula (XIV) comprises a bridged n-bicyclic sulfonamide or a pharmaceutically acceptable salt thereof. In some embodiments, the compound of formula (XIV) is selected from:

[chemical structure]

[chemical structure]

or a pharmaceutically acceptable salt thereof.

### Antibody Molecules Targeting Gamma Secretase

[0355] The compositions, methods and uses described herein comprise a gamma secretase inhibitor (GSI). In some embodiments, the GSI is an antibody molecule that reduces the expression and/or function of gamma secretase. In some embodiments, the GSI is an antibody molecule targeting a subunit of gamma secretase. In some embodiments, the GSI is chosen from an anti-presenilin antibody molecule, an anti-nicastrin antibody molecule, an anti-APH-1 antibody molecule, or an anti-PEN-2 antibody molecule.

[0356] Exemplary antibody molecules that target a subunit of gamma secretase (e.g., e.g., presenilin, nicastrin, APH-1, or PEN-2) are described in U.S. Pat. Nos. 8,394,376, 8,637,274, and 5,942,400, incorporated by reference herein in their entirety.

### Gene Editing Systems Targeting Gamma Secretase

[0357] According to the present invention, gene editing systems can be used as inhibitors of gamma secretase (e.g., a subunit of gamma secretase, e.g., presenilin, nicastrin, APH-1, or PEN-2). Also contemplated by the present invention are the uses of a nucleic acid encoding one or more components of a gene editing system targeting gamma secretase (e.g., a subunit of gamma secretase, e.g., presenilin, nicastrin, APH-1, or PEN-2).

### CRISPR/Cas9 Gene Editing Systems

[0358] Naturally-occurring CRISPR/Cas systems are found in approximately 40% of sequenced eubacteria genomes and 90% of sequenced archaea. Grissa et al. (2007) BMC Bioinformatics 8: 172. This system is a type of prokaryotic immune system that confers resistance to foreign genetic elements such as plasmids and phages and provides a form of acquired immunity. Barrangou et al. (2007) Science 315: 1709-1712; Marragini et al. (2008) Science 322: 1843-1845.

[0359] The CRISPR/Cas system has been modified for use in gene editing (silencing, enhancing or changing specific genes) in eukaryotes such as mice or primates. Wiedenheft et al. (2012) Nature 482: 331-8. This is accomplished by, for example, introducing into the eukaryotic cell a plasmid containing a specifically designed CRISPR and one or more appropriate Cas.

[0360] The CRISPR sequence, sometimes called a CRISPR locus, comprises alternating repeats and spacers. In a naturally-occurring CRISPR, the spacers usually comprise sequences foreign to the bacterium such as a plasmid or phage sequence. In an exemplary CRISPR/Cas system targeting gamma secretase (e.g., a subunit of gamma secretase, e.g., presenilin, nicastrin, APH-1, or PEN-2), the spacers are derived from the gene sequence of gamma secretase (e.g., a subunit of gamma secretase, e.g., presenilin, nicastrin, APH-1, or PEN-2), or a sequence of its regulatory elements.

[0361] RNA from the CRISPR locus is constitutively expressed and processed into small RNAs. These comprise a spacer flanked by a repeat sequence. The RNAs guide other Cas proteins to silence exogenous genetic elements at the RNA or DNA level. Horvath et al. (2010) Science 327: 167-170; Makarova et al. (2006) Biology Direct 1: 7. The spacers thus serve as templates for RNA molecules, analogously to siRNAs. Pennisi (2013) Science 341: 833-836.

[0362] As these naturally occur in many different types of bacteria, the exact arrangements of the CRISPR and structure, function and number of Cas genes and their product differ somewhat from species to species. Haft et al. (2005) PLoS Comput. Biol. 1: e60; Kunin et al. (2007) Genome Biol. 8: R61; Mojica et al. (2005) J. Mol. Evol. 60: 174-182; Bolotin et al. (2005) Microbiol. 151: 2551-2561; Pourcel et al. (2005) Microbiol. 151: 653-663; and Stern et al. (2010) Trends. Genet. 28: 335-340. For example, the Cse (Cas subtype, E. coli) proteins (e.g., CasA) form a functional complex, Cascade, that processes CRISPR RNA transcripts into spacer-repeat units that Cascade retains. Brouns et al. (2008) Science 321: 960-964. In other prokaryotes, Cas6 processes the CRISPR transcript. The CRISPR-based phage inactivation in E. coli requires Cascade and Cas3, but not Cas1 or Cas2. The Cmr (Cas RAMP module) proteins in Pyrococcus furiosus and other prokaryotes form a functional complex with small CRISPR RNAs that recognizes and cleaves complementary target RNAs. A simpler CRISPR system relies on the protein Cas9, which is a nuclease with two active cutting sites, one for each strand of the double helix. Combining Cas9 and modified CRISPR locus RNA can be used in a system for gene editing. Pennisi (2013) Science 341: 833-836.

[0363] The CRISPR/Cas system can thus be used to modify, e.g., delete one or more nucleic acids, e.g., a gene encoding gamma secretase (e.g., a subunit of gamma secretase, e.g., presenilin, nicastrin, APH-1, or PEN-2), or a regulatory element of a gene encoding gamma secretase (e.g., a subunit of gamma secretase, e.g., presenilin, nicastrin, APH-1, or PEN-2), or introduce a premature stop which thus decreases expression of a functional gamma secretase (e.g., a subunit of gamma secretase, e.g., presenilin, nicastrin, APH-1, or PEN-2). The CRISPR/Cas system can alternatively be used like RNA interference, turning off a gene encoding gamma secretase (e.g., a subunit of gamma secretase, e.g., presenilin, nicastrin, APH-1, or PEN-2) in a reversible fashion. In a mammalian cell, for example, the RNA can guide the Cas protein to a promoter of a gene encoding gamma secretase (e.g., a subunit of gamma secretase, e.g., presenilin, nicastrin, APH-1, or PEN-2), sterically blocking RNA polymerases.

[0364] CRISPR/Cas systems for gene editing in eukaryotic cells typically involve (1) a guide RNA molecule (gRNA) comprising a targeting sequence (which is capable of hybridizing to the genomic DNA target sequence), and sequence which is capable of binding to a Cas, e.g., Cas9 enzyme, and (2) a Cas, e.g., Cas9, protein. The targeting sequence and the sequence which is capable of binding to a Cas, e.g., Cas9 enzyme, may be disposed on the same or different molecules. If disposed on different molecules, each includes a hybridization domain which allows the molecules to associate, e.g., through hybridization.

[0365] Artificial CRISPR/Cas systems can be generated which inhibit a gene encoding gamma secretase (e.g., a subunit of gamma secretase, e.g., presenilin, nicastrin, APH-1, or PEN-2), using technology known in the art, e.g., that are described in U.S. Publication No. 20140068797, WO2015/048577, and Cong (2013) Science 339: 819-823. Other artificial CRISPR/Cas systems that are known in the art may also be generated which inhibit a gene encoding gamma secretase (e.g., a subunit of gamma secretase, e.g., presenilin, nicastrin, APH-1, or PEN-2), e.g., that described in Tsai (2014) Nature Biotechnol., 32:6 569-576, U.S. Pat. Nos. 8,871,445; 8,865,406; 8,795,965; 8,771,945; and 8,697,359, the contents of which are hereby incorporated by reference in their entirety. Such systems can be generated which inhibit a gene encoding gamma secretase (e.g., a subunit of gamma secretase, e.g., presenilin, nicastrin, APH-1, or PEN-2), by, for example, engineering a CRISPR/Cas system to include a gRNA molecule comprising a targeting sequence that hybridizes to a sequence of a target gene, e.g., a gene encoding gamma secretase (e.g., a subunit of gamma secretase, e.g., presenilin, nicastrin, APH-1, or PEN-2). In embodiments, the gRNA comprises a targeting sequence which is fully complementarity to 15-25 nucleotides, e.g., 20 nucleotides, of a target gene, e.g., a gene encoding gamma secretase (e.g., a subunit of gamma secretase, e.g., presenilin, nicastrin, APH-1, or PEN-2). In embodiments, the 15-25 nucleotides, e.g., 20 nucleotides, of a target gene, e.g., a gene encoding gamma secretase (e.g., a subunit of gamma secretase, e.g., presenilin, nicastrin, APH-1, or PEN-2), are disposed immediately 5′ to a protospacer adjacent motif (PAM) sequence recognized by the Cas protein of the CRISPR/Cas system (e.g., where the system comprises a S. pyogenes Cas9 protein, the PAM sequence comprises NGG, where N can be any of A, T, G or C).

[0366] In an embodiment, the CRISPR/Cas system of the present invention comprises Cas9, e.g., S. pyogenes Cas9, and a gRNA comprising a targeting sequence which hybridizes to a sequence of a gene encoding gamma secretase (e.g., a subunit of gamma secretase, e.g., presenilin, nicastrin, APH-1, or PEN-2). In an embodiment, the CRISPR/Cas system comprises nucleic acid encoding a gRNA specific for a gene encoding gamma secretase (e.g., a subunit of gamma secretase, e.g., presenilin, nicastrin, APH-1, or PEN-2), and a nucleic acid encoding a Cas protein, e.g., Cas9, e.g., S. pyogenes Cas9. In an embodiment, the CRISPR/Cas system comprises a gRNA specific for a gene encoding gamma secretase (e.g., a subunit of gamma secretase, e.g., presenilin, nicastrin, APH-1, or PEN-2), and a nucleic acid encoding a Cas protein, e.g., Cas9, e.g., S. pyogenes Cas9.

### TALEN Gene Editing Systems

[0367] TALENs are produced artificially by fusing a TAL effector DNA binding domain to a DNA cleavage domain Transcription activator-like effects (TALEs) can be engineered to bind any desired DNA sequence, including a portion of the HLA or TCR gene. By combining an engineered TALE with a DNA cleavage domain, a restriction enzyme can be produced which is specific to any desired DNA sequence, including a HLA or TCR sequence. These can then be introduced into a cell, wherein they can be used for genome editing. Boch (2011) Nature Biotech. 29: 135-6; and Boch et al. (2009) Science 326: 1509-12; Moscou et al. (2009) Science 326: 3501.

[0368] TALEs are proteins secreted by Xanthomonas bacteria. The DNA binding domain contains a repeated, highly conserved 33-34 amino acid sequence, with the exception of the 12th and 13th amino acids. These two positions are highly variable, showing a strong correlation with specific nucleotide recognition. They can thus be engineered to bind to a desired DNA sequence.

[0369] To produce a TALEN, a TALE protein is fused to a nuclease (N), which is, for example, a wild-type or mutated Fold endonuclease. Several mutations to FokI have been made for its use in TALENs; these, for example, improve cleavage specificity or activity. Cermak et al. (2011) Nucl. Acids Res. 39: e82; Miller et al. (2011) Nature Biotech. 29: 143-8; Hockemeyer et al. (2011) Nature Biotech. 29: 731-734; Wood et al. (2011) Science 333: 307; Doyon et al. (2010) Nature Methods 8: 74-79; Szczepek et al. (2007) Nature Biotech. 25: 786-793; and Guo et al. (2010) J. Mol. Biol. 200: 96.

[0370] The FokI domain functions as a dimer, requiring two constructs with unique DNA binding domains for sites in the target genome with proper orientation and spacing. Both the number of amino acid residues between the TALE DNA binding domain and the Fold cleavage domain and the number of bases between the two individual TALEN binding sites appear to be important parameters for achieving high levels of activity. Miller et al. (2011) Nature Biotech. 29: 143-8.

[0371] A TALEN specific for a gene encoding gamma secretase (e.g., a subunit of gamma secretase, e.g., presenilin, nicastrin, APH-1, or PEN-2), can be used inside a cell to produce a double-stranded break (DSB). A mutation can be introduced at the break site if the repair mechanisms improperly repair the break via non-homologous end joining. For example, improper repair may introduce a frame shift mutation.

[0372] TALENs specific to sequences in a gene encoding gamma secretase (e.g., a subunit of gamma secretase, e.g., presenilin, nicastrin, APH-1, or PEN-2), can be constructed using any method known in the art, including various schemes using modular components. Zhang et al. (2011) Nature Biotech. 29: 149-53; Geibler et al. (2011) PLoS ONE 6: e19509; U.S. Pat. Nos. 8,420,782; 8,470,973, the contents of which are hereby incorporated by reference in their entirety.

### Zinc Finger Nucleases

[0373] “ZFN” or “Zinc Finger Nuclease” refers to a zinc finger nuclease, an artificial nuclease which can be used to modify, e.g., delete one or more nucleic acids of, a desired nucleic acid sequence, e.g., a gene encoding gamma secretase (e.g., a subunit of gamma secretase, e.g., presenilin, nicastrin, APH-1, or PEN-2).

[0374] Like a TALEN, a ZFN comprises a FokI nuclease domain (or derivative thereof) fused to a DNA-binding domain. In the case of a ZFN, the DNA-binding domain comprises one or more zinc fingers. Carroll et al. (2011) Genetics Society of America 188: 773-782; and Kim et al. (1996) Proc. Natl. Acad. Sci. USA 93: 1156-1160.

[0375] A zinc finger is a small protein structural motif stabilized by one or more zinc ions. A zinc finger can comprise, for example, Cys2His2, and can recognize an approximately 3-bp sequence. Various zinc fingers of known specificity can be combined to produce multi-finger polypeptides which recognize about 6, 9, 12, 15 or 18-bp sequences. Various selection and modular assembly techniques are available to generate zinc fingers (and combinations thereof) recognizing specific sequences, including phage display, yeast one-hybrid systems, bacterial one-hybrid and two-hybrid systems, and mammalian cells.

[0376] Like a TALEN, a ZFN must dimerize to cleave DNA. Thus, a pair of ZFNs are required to target non-palindromic DNA sites. The two individual ZFNs must bind opposite strands of the DNA with their nucleases properly spaced apart. Bitinaite et al. (1998) Proc. Natl. Acad. Sci. USA 95: 10570-5.

[0377] Also like a TALEN, a ZFN can create a double-stranded break in the DNA, which can create a frame-shift mutation if improperly repaired, leading to a decrease in the expression of a gene encoding gamma secretase (e.g., a subunit of gamma secretase, e.g., presenilin, nicastrin, APH-1, or PEN-2), in a cell. ZFNs can also be used with homologous recombination to mutate a gene encoding gamma secretase (e.g., a subunit of gamma secretase, e.g., presenilin, nicastrin, APH-1, or PEN-2).

[0378] ZFNs specific to sequences in a gene encoding gamma secretase (e.g., a subunit of gamma secretase, e.g., presenilin, nicastrin, APH-1, or PEN-2), can be constructed using any method known in the art. See, e.g., Provasi (2011) Nature Med. 18: 807-815; Torikai (2013) Blood 122: 1341-1349; Cathomen et al. (2008) Mol. Ther. 16: 1200-7; and Guo et al. (2010) J. Mol. Biol. 400: 96; U.S. Patent Publication 2011/0158957; and U.S. Patent Publication 2012/0060230, the contents of which are hereby incorporated by reference in their entirety. In embodiments, The ZFN gene editing system may also comprise nucleic acid encoding one or more components of the ZFN gene editing system, e.g., a ZFN gene editing system targeted to a gene encoding gamma secretase (e.g., a subunit of gamma secretase, e.g., presenilin, nicastrin, APH-1, or PEN-2).

Double-Stranded RNA, e.g., siRNA or shRNA, Targeting Gamma Secretase

[0379] According to the present invention, double stranded RNA (“dsRNA”), e.g., siRNA or shRNA can be used to inhibit a gene encoding gamma secretase (e.g., a subunit of gamma secretase, e.g., presenilin, nicastrin, APH-1, or PEN-2). Also contemplated by the present invention are the uses of a nucleic acid encoding said dsRNA inhibitors of a gene encoding gamma secretase (e.g., a subunit of gamma secretase, e.g., presenilin, nicastrin, APH-1, or PEN-2).

[0380] In an embodiment, the GSI is a nucleic acid, e.g., a dsRNA, e.g., a siRNA or shRNA specific for a nucleic acid encoding gamma secretase (e.g., a subunit of gamma secretase, e.g., presenilin, nicastrin, APH-1, or PEN-2).

[0381] An aspect of the invention provides a composition comprising a dsRNA, e.g., a siRNA or shRNA, comprising at least 15 contiguous nucleotides, e.g., 15, 16, 17, 18, 19, 20, 21, 22, 23, 24 or 25 contiguous nucleotides, e.g., 21 contiguous nucleotides. It is understood that some of the target sequences and/or shRNA molecules are presented as DNA, but the dsRNA agents targeting these sequences or comprising these sequences can be RNA, or any nucleotide, modified nucleotide or substitute disclosed herein and/or known in the art, provided that the molecule can still mediate RNA interference.

[0382] In embodiments, the GSI is a nucleic acid, e.g., DNA, encoding a dsRNA inhibitor, e.g., shRNA or siRNA, of any of the above embodiments. In embodiments, the nucleic acid, e.g., DNA, is disposed on a vector, e.g., any conventional expression system, e.g., as described herein, e.g., a lentiviral vector.

### BCMA-Targeting Chimeric Antigen Receptor (CAR)

[0383] Provided herein are compositions of matter and methods of use for the treatment of a disease associated with expression of BCMA a cell (e.g., a population of cells) that expresses a chimeric antigen receptor (CAR) molecule that binds BCMA (a “BCMA CAR-expressing cell”), in combination with a gamma secretase inhibitor (GSI).

[0384] In one aspect, the present invention provides compositions and their use in medicaments or methods for treating, among other diseases, cancer or any malignancy or autoimmune diseases involving cells or tissues that express BCMA.

[0385] In one aspect, the compositions of the invention can be used to eradicate BCMA-expressing normal cells, thereby applicable for use as a conditioning therapy prior to cell transplantation. In one aspect, the BCMA-expressing normal cell is a BCMA-expressing normal stem cell and the cell transplantation is a stem cell transplantation.

[0386] In one aspect, the invention provides a number of chimeric antigen receptors (CAR) comprising an antibody or antibody fragment engineered for enhanced binding to a BCMA protein. In one aspect, the invention provides a cell (e.g., an immune effector cell, e.g., T cell or NK cell) engineered to express a CAR, wherein the CAR T cell (“CART”) or CAR NK cell exhibits an antitumor property. In one aspect a cell is transformed with the CAR and the CAR is expressed on the cell surface. In some embodiments, the cell (e.g., an immune effector cell, e.g., T cell or NK cell) is transduced with a viral vector encoding a CAR. In some embodiments, the viral vector is a retroviral vector. In some embodiments, the viral vector is a lentiviral vector. In some such embodiments, the cell may stably express the CAR. In another embodiment, the cell (e.g., an immune effector cell, e.g., T cell or NK cell) is transfected with a nucleic acid, e.g., mRNA, cDNA, DNA, encoding a CAR. In some such embodiments, the cell may transiently express the CAR.

[0387] In one aspect, the anti-BCMA antigen binding portion of the CAR is a scFv antibody fragment. In one aspect such antibody fragments are functional in that they retain the equivalent binding affinity, e.g., they bind the same antigen with comparable efficacy, as the IgG antibody from which it is derived. In other embodiments, the antibody fragment has a lower binding affinity, e.g., it binds the same antigen with a lower binding affinity than the antibody from which it is derived, but is functional in that it provides a biological response described herein. In one embodiment, the CAR molecule comprises an antibody fragment that has a binding affinity KD of 10-4 M to 10-8 M, e.g., 10-5 M to 10-7 M, e.g., 10-6 M or 10-7 M, for the target antigen. In one embodiment, the antibody fragment has a binding affinity that is at least five-fold, 10-fold, 20-fold, 30-fold, 50-fold, 100-fold or 1,000-fold less than a reference antibody, e.g., an antibody described herein.

[0388] In one aspect such antibody fragments are functional in that they provide a biological response that can include, but is not limited to, activation of an immune response, inhibition of signal-transduction origination from its target antigen, inhibition of kinase activity, and the like, as will be understood by a skilled artisan. In one aspect, the anti-BCMA antigen binding domain of the CAR is a scFv antibody fragment that is humanized compared to the murine sequence of the scFv from which it is derived. In one embodiment, the anti-BCMA antigen binding domain is a human anti-BCMA antigen binding domain. In one embodiment, the anti-BCMA antigen binding domain is a humanized anti-BCMA antigen binding domain.

[0389] In some aspects, the antibodies of the invention are incorporated into a chimeric antigen receptor (CAR). In one aspect, the CAR comprises a BCMA binding domain comprising a sequence of SEQ ID NO: 39, SEQ ID NO: 40, SEQ ID NO: 41, SEQ ID NO: 42, SEQ ID NO: 43, SEQ ID NO: 44, SEQ ID NO: 45, SEQ ID NO: 46, SEQ ID NO: 47, SEQ ID NO: 48, SEQ ID NO: 49, SEQ ID NO: 50, SEQ ID NO: 51, SEQ ID NO: 52, SEQ ID NO: 53, SEQ ID NO:129, SEQ ID NO:130, SEQ ID NO:131, SEQ ID NO:132, SEQ ID NO:133, SEQ ID NO:134, SEQ ID NO: 135, SEQ ID NO:136, SEQ ID NO: 137, SEQ ID NO:138, SEQ ID NO: 139, SEQ ID NO: 140, SEQ ID NO: 141, SEQ ID NO: 142, SEQ ID NO: 143, SEQ ID NO: 144, SEQ ID NO: 145, SEQ ID NO: 146, SEQ ID NO: 147, SEQ ID NO: 148, SEQ ID NO: 149, SEQ ID NO: 263, SEQ ID NO: 264, SEQ ID NO: 265, or SEQ ID NO: 266. In one aspect, the scFv domains are human. In another aspect, the scFv domains are humanized variants of the scFv domain of the antibodies or antibody fragments described in PCT Publication No. WO 2012/163805, U.S. Pat. No. 7,083,785, EP Patent No. 1975231B1, or PCT Publication No. WO 13/154760 (the contents of each are hereby incorporated by reference in their entireties), which disclose antibodies or scFv fragments of murine origin that specifically binds to human BCMA. Humanization of these mouse antibodies and/or scFvs may be desired for the clinical setting, where the mouse-specific residues may induce a human-anti-mouse antigen (HAMA) response in patients who receive CART-BCMA treatment, e.g., treatment with immune effector cells, e.g., T cells or NK cells, transduced with the anti-BCMA CAR construct.

[0390] In one aspect, the anti-BCMA binding domain, e.g., human or humanized scFv, portion of a CAR of the invention is encoded by a transgene whose sequence has been codon optimized for expression in a mammalian cell. In one aspect, entire CAR construct of the invention is encoded by a transgene whose entire sequence has been codon optimized for expression in a mammalian cell. Codon optimization refers to the discovery that the frequency of occurrence of synonymous codons (i.e., codons that code for the same amino acid) in coding DNA is biased in different species. Such codon degeneracy allows an identical polypeptide to be encoded by a variety of nucleotide sequences. A variety of codon optimization methods is known in the art, and include, e.g., methods disclosed in at least U.S. Pat. Nos. 5,786,464 and 6,114,148.

[0391] In one aspect, the human anti-BCMA binding domain comprises the scFv portion provided in SEQ ID NO: 39. In one aspect, the human anti-BCMA CAR comprises the scFv portion provided in SEQ ID NO: 40. In one aspect, the human anti-BCMA binding domain comprises the scFv portion provided in SEQ ID NO: 41. In one aspect, the human anti-BCMA binding domain comprises the scFv portion provided in SEQ ID NO: 42. In one aspect, the human anti-BCMA binding domain comprises the scFv portion provided in SEQ ID NO: 43. In one aspect, the human anti-BCMA binding domain comprises the scFv portion provided in SEQ ID NO: 44. In one aspect, the human anti-BCMA binding domain comprises the scFv portion provided in SEQ ID NO: 45. In one aspect, the human anti-BCMA binding domain comprises the scFv portion provided in SEQ ID NO: 46. In one aspect, the human anti-BCMA binding domain comprises the scFv portion provided in SEQ ID NO: 47. In one aspect, the human anti-BCMA binding domain comprises the scFv portion provided in SEQ ID NO: 48. In one aspect, the human anti-BCMA binding domain comprises the scFv portion provided in SEQ ID NO: 49. In one aspect, the human anti-BCMA binding domain comprises the scFv portion provided in SEQ ID NO: 50. In one aspect, the human anti-BCMA binding domain comprises the scFv portion provided in SEQ ID NO: 51. In one aspect, the human anti-BCMA binding domain comprises the scFv portion provided in SEQ ID NO: 52. In one aspect, the human anti-BCMA binding domain comprises the scFv portion provided in SEQ ID NO: 53. In one aspect, the human anti-BCMA binding domain comprises the scFv portion provided in SEQ ID NO: 129. In one aspect, the human anti-BCMA binding domain comprises the scFv portion provided in SEQ ID NO: 130. In one aspect, the human anti-BCMA CAR comprises the scFv portion provided in SEQ ID NO: 131. In one aspect, the human anti-BCMA binding domain comprises the scFv portion provided in SEQ ID NO: 132. In one aspect, the human anti-BCMA binding domain comprises the scFv portion provided in SEQ ID NO: 133. In one aspect, the human anti-BCMA binding domain comprises the scFv portion provided in SEQ ID NO: 134. In one aspect, the human anti-BCMA binding domain comprises the scFv portion provided in SEQ ID NO: 135. In one aspect, the human anti-BCMA binding domain comprises the scFv portion provided in SEQ ID NO: 136. In one aspect, the human anti-BCMA binding domain comprises the scFv portion provided in SEQ ID NO: 137. In one aspect, the human anti-BCMA binding domain comprises the scFv portion provided in SEQ ID NO: 138. In one aspect, the human anti-BCMA binding domaincomprises the scFv portion provided in SEQ ID NO: 139. In one aspect, the human anti-BCMA binding domain comprises the scFv portion provided in SEQ ID NO: 140. In one aspect, the human anti-BCMA binding domain comprises the scFv portion provided in SEQ ID NO: 141. In one aspect, the human anti-BCMA CAR comprises the scFv portion provided in SEQ ID NO: 142. In one aspect, the human anti-BCMA CAR comprises the scFv portion provided in SEQ ID NO: 143. In one aspect, the human anti-BCMA CAR comprises the scFv portion provided in SEQ ID NO: 144. In one aspect, the human anti-BCMA CAR comprises the scFv portion provided in SEQ ID NO: 145. In one aspect, the human anti-BCMA CAR comprises the scFv portion provided in SEQ ID NO: 146. In one aspect, the human anti-BCMA CAR comprises the scFv portion provided in SEQ ID NO: 147. In one aspect, the human anti-BCMA CAR comprises the scFv portion provided in SEQ ID NO: 148. In one aspect, the human anti-BCMA CAR comprises the scFv portion provided in SEQ ID NO: 149. In one aspect, the humanized anti-BCMA binding domain comprises the scFv portion provided in SEQ ID NO: 255. In one aspect, the humanized anti-BCMA CAR comprises the scFv portion provided in SEQ ID NO: 257.

[0392] In one aspect, the human anti-BCMA CAR comprises the scFv portion provided in SEQ ID NO: 263. In one aspect, the human anti-BCMA CAR comprises the scFv portion provided in SEQ ID NO: 264. In one aspect, the human anti-BCMA CAR comprises the scFv portion provided in SEQ ID NO: 265. In one aspect, the human anti-BCMA CAR comprises the scFv portion provided in SEQ ID NO: 266.

[0393] In one aspect, the CARs of the invention combine an antigen binding domain of a specific antibody with an intracellular signaling molecule. For example, in some aspects, the intracellular signaling molecule includes, but is not limited to, CD3-zeta chain, 4-1BB and CD28 signaling modules and combinations thereof. In one aspect, the antigen binding domain binds to BCMA. In one aspect, the BCMA CAR comprises a CAR selected from the sequence provided in one or more of residues 22-483 of SEQ ID NO: 109, residues 22-490 of SEQ ID NO: 99, residues 22-488 of SEQ ID NO: 100, residues 22-487 of SEQ ID NO: 101, residues 22-493 of SEQ ID NO: 102, residues 22-490 of SEQ ID NO: 103, residues 22-491 of SEQ ID NO: 104, residues 22-482 of SEQ ID NO: 105, residues 22-483 of SEQ ID NO: 106, residues 22-485 of SEQ ID NO: 107, residues 22-483 of SEQ ID NO: 108, residues 22-490 of SEQ ID NO: 110, residues 22-483 of SEQ ID NO: 111, residues 22-484 of SEQ ID NO: 112, residues 22-485 of SEQ ID NO: 113, residues 22-487 of SEQ ID NO: 213, residues 23-489 of SEQ ID NO: 214, residues 22-490 of SEQ ID NO: 215, residues 22-484 of SEQ ID NO: 216, residues 22-485 of SEQ ID NO: 217, residues 22-489 of SEQ ID NO: 218, residues 22-497 of SEQ ID NO: 219, residues 22-492 of SEQ ID NO: 220, residues 22-490 of SEQ ID NO: 221, residues 22-485 of SEQ ID NO: 222, residues 22-492 of SEQ ID NO: 223, residues 22-492 of SEQ ID NO: 224, residues 22-483 of SEQ ID NO: 225, residues 22-490 of SEQ ID NO: 226, residues 22-485 of SEQ ID NO: 227, residues 22-486 of SEQ ID NO: 228, residues 22-492 of SEQ ID NO: 229, residues 22-488 of SEQ ID NO: 230, residues 22-488 of SEQ ID NO: 231, residues 22-495 of SEQ ID NO: 232, residues 22-490 of SEQ ID NO: 233.

[0394] Furthermore, the present invention provides BCMA CAR compositions and their use in medicaments or methods for treating, among other diseases, cancer or any malignancy or autoimmune diseases involving cells or tissues which express BCMA.

[0395] In one aspect, the CAR of the invention can be used to eradicate BCMA-expressing normal cells, thereby applicable for use as a cellular conditioning therapy prior to cell transplantation. In one aspect, the BCMA-expressing normal cell is a BCMA-expressing normal stem cell and the cell transplantation is a stem cell transplantation.

[0396] In one aspect, the invention provides a cell (e.g., T cell or NK cell) engineered to express a chimeric antigen receptor (CAR), wherein the CAR T cell (“CART”) or the CAR NK cell exhibits an antitumor property. A preferred antigen is BCMA. In one aspect, the antigen binding domain of the CAR comprises a human anti-BCMA antibody fragment or a partially humanized anti-BCMA antibody fragment. In one aspect, the antigen binding domain of the CAR comprises human anti-BCMA antibody fragment or a partially humanized anti-BCMA antibody fragment comprising an scFv. Accordingly, the invention provides a BCMA-CAR that comprises a humanized anti-BCMA binding domain and is engineered into a cell, e.g., a T cell or NK cell, and methods of their use for adoptive therapy.

[0397] In one aspect, the BCMA-CAR comprises at least one intracellular domain selected from the group of a CD137 (4-1BB) signaling domain, a CD28 signaling domain, a CD3zeta signal domain, and any combination thereof. In one aspect, the BCMA-CAR comprises at least one intracellular signaling domain is from one or more co-stimulatory molecule(s) other than a CD137 (4-1BB) or CD28.

### Chimeric Antigen Receptor (CAR)

[0398] The present invention provides a CAR (e.g., a CAR polypeptide) that comprises an anti-BCMA binding domain (e.g., human or humanized BCMA binding domain as described herein), a transmembrane domain, and an intracellular signaling domain, and wherein said anti-BCMA binding domain comprises a heavy chain complementary determining region 1 (HC CDR1), a heavy chain complementary determining region 2 (HC CDR2), and a heavy chain complementary determining region 3 (HC CDR3) of any anti-BMCA heavy chain binding domain amino acid sequences listed in Table 1 or 16. The anti-BCMA binding domain of the CAR can further comprise a light chain complementary determining region 1 (LC CDR1), a light chain complementary determining region 2 (LC CDR2), and a light chain complementary determining region 3 (LC CDR3) of any anti-BMCA heavy chain binding domain amino acid sequences listed in Table 1 or 16.

[0399] The present invention also provides nucleic acid molecules encoding the CAR as described herein, e.g., encoding a CAR that comprises an anti-BCMA binding domain (e.g., human or humanized BCMA binding domain as described herein), a transmembrane domain, and an intracellular signaling domain, and wherein said anti-BCMA binding domain comprises a heavy chain complementary determining region 1 (HC CDR1), a heavy chain complementary determining region 2 (HC CDR2), and a heavy chain complementary determining region 3 (HC CDR3) of any anti-BMCA heavy chain binding domain amino acid sequences listed in Table 1 or 16. In one embodiment, the encoded anti-BCMA binding domain of the CAR can further comprise a light chain complementary determining region 1 (LC CDR1), a light chain complementary determining region 2 (LC CDR2), and a light chain complementary determining region 3 (LC CDR3) of any anti-BMCA heavy chain binding domain amino acid sequences listed in Table 1 or 16.

[0400] In specific aspects, a CAR construct of the invention comprises a scFv domain selected from the group consisting of SEQ ID NO: 39, SEQ ID NO: 40, SEQ ID NO: 41, SEQ ID NO: 42, SEQ ID NO: 43, SEQ ID NO: 44, SEQ ID NO: 45, SEQ ID NO: 46, SEQ ID NO: 47, SEQ ID NO: 48, SEQ ID NO: 49, SEQ ID NO: 50, SEQ ID NO: 51, SEQ ID NO: 52, SEQ ID NO: 53, SEQ ID NO: 129, SEQ ID NO: 130, SEQ ID NO: 131, SEQ ID NO: 132, SEQ ID NO: 133, SEQ ID NO: 134, SEQ ID NO: 135, SEQ ID NO: 136, SEQ ID NO: 137, SEQ ID NO: 138, SEQ ID NO: 139, SEQ ID NO: 140, SEQ ID NO: 141, SEQ ID NO: 142, SEQ ID NO: 143, SEQ ID NO: 144, SEQ ID NO: 145, SEQ ID NO: 146, SEQ ID NO: 147, SEQ ID NO: 148, SEQ ID NO: 149, SEQ ID NO: 263, SEQ ID NO: 264, SEQ ID NO: 265, and SEQ ID NO: 266, wherein the scFv may be preceded by an optional leader sequence such as provided in SEQ ID NO: 1, and followed by an optional hinge sequence such as provided in SEQ ID NO:2 or SEQ ID NO:3 or SEQ ID NO:4 or SEQ ID NO:5, a transmembrane region such as provided in SEQ ID NO:6, an intracellular signalling domain that includes SEQ ID NO:7 or SEQ ID NO:8 and a CD3 zeta sequence that includes SEQ ID NO:9 or SEQ ID NO:10, wherein the domains are contiguous with and in the same reading frame to form a single fusion protein. Also included in the invention is a nucleotide sequence that encodes the polypeptide of each of the scFv fragments selected from the group consisting of SEQ ID NO: 39, SEQ ID NO: 40, SEQ ID NO: 41, SEQ ID NO: 42, SEQ ID NO: 43, SEQ ID NO: 44, SEQ ID NO: 45, SEQ ID NO: 46, SEQ ID NO: 47, SEQ ID NO: 48, SEQ ID NO: 49, SEQ ID NO: 50, SEQ ID NO: 51, SEQ ID NO: 52, SEQ ID NO: 53, SEQ ID NO: 129, SEQ ID NO: 130, SEQ ID NO: 131, SEQ ID NO: 132, SEQ ID NO: 133, SEQ ID NO: 134, SEQ ID NO: 135, SEQ ID NO: 136, SEQ ID NO: 137, SEQ ID NO: 138, SEQ ID NO: 139, SEQ ID NO: 140, SEQ ID NO: 141, SEQ ID NO: 142, SEQ ID NO: 143, SEQ ID NO: 144, SEQ ID NO: 145, SEQ ID NO: 146, SEQ ID NO: 147, SEQ ID NO: 148, SEQ ID NO: 149, SEQ ID NO: 263, SEQ ID NO: 264, SEQ ID NO: 265, and SEQ ID NO: 266.

[0401] Also included in the invention is a nucleotide sequence that encodes the polypeptide of each of the scFv fragments selected from the group consisting of SEQ ID NO: 39, SEQ ID NO: 40, SEQ ID NO: 41, SEQ ID NO: 42, SEQ ID NO: 43, SEQ ID NO: 44, SEQ ID NO: 45, SEQ ID NO: 46, SEQ ID NO: 47, SEQ ID NO: 48, SEQ ID NO: 49, SEQ ID NO: 50, SEQ ID NO: 51, SEQ ID NO: 52, SEQ ID NO: 53, SEQ ID NO: 129, SEQ ID NO: 130, SEQ ID NO: 131, SEQ ID NO: 132, SEQ ID NO: 133, SEQ ID NO: 134, SEQ ID NO: 135, SEQ ID NO: 136, SEQ ID NO: 137, SEQ ID NO: 138, SEQ ID NO: 139, SEQ ID NO: 140, SEQ ID NO: 141, SEQ ID NO: 142, SEQ ID NO: 143, SEQ ID NO: 144, SEQ ID NO: 145, SEQ ID NO: 146, SEQ ID NO: 147, SEQ ID NO: 148, SEQ ID NO: 149, SEQ ID NO: 263, SEQ ID NO: 264, SEQ ID NO: 265, and SEQ ID NO: 266, and each of the domains of SEQ ID NOS: 1,2, and 6-9, plus the encoded BCMA CAR fusion protein of the invention.

[0402] In one aspect, an exemplary BCMA CAR constructs comprise an optional leader sequence, an extracellular antigen binding domain, a hinge, a transmembrane domain, and an intracellular stimulatory domain. In one aspect an exemplary BCMA CAR construct comprises an optional leader sequence, an extracellular antigen binding domain, a hinge, a transmembrane domain, an intracellular costimulatory domain and an intracellular stimulatory domain. Specific BCMA CAR constructs containing human scFv domains of the invention are provided as SEQ ID NO: 39, SEQ ID NO: 40, SEQ ID NO: 41, SEQ ID NO: 42, SEQ ID NO: 43, SEQ ID NO: 44, SEQ ID NO: 45, SEQ ID NO: 46, SEQ ID NO: 47, SEQ ID NO: 48, SEQ ID NO: 49, SEQ ID NO: 50, SEQ ID NO: 51, SEQ ID NO: 52, SEQ ID NO: 53, SEQ ID NO: 129, SEQ ID NO: 130, SEQ ID NO: 131, SEQ ID NO: 132, SEQ ID NO: 133, SEQ ID NO: 134, SEQ ID NO: 135, SEQ ID NO: 136, SEQ ID NO: 137, SEQ ID NO: 138, SEQ ID NO: 139, SEQ ID NO: 140, SEQ ID NO: 141, SEQ ID NO: 142, SEQ ID NO: 143, SEQ ID NO: 144, SEQ ID NO: 145, SEQ ID NO: 146, SEQ ID NO: 147, SEQ ID NO: 148, and SEQ ID NO: 149. Full-length CAR sequences are also provided herein as SEQ ID NO: 39, SEQ ID NO: 40, SEQ ID NO: 41, SEQ ID NO: 42, SEQ ID NO: 43, SEQ ID NO: 44, SEQ ID NO: 45, SEQ ID NO: 46, SEQ ID NO: 47, SEQ ID NO: 48, SEQ ID NO: 49, SEQ ID NO: 50, SEQ ID NO: 51, SEQ ID NO: 52, SEQ ID NO: 53, SEQ ID NO: 129, SEQ ID NO: 130, SEQ ID NO: 131, SEQ ID NO: 132, SEQ ID NO: 133, SEQ ID NO: 134, SEQ ID NO: 135, SEQ ID NO: 136, SEQ ID NO: 137, SEQ ID NO: 138, SEQ ID NO: 139, SEQ ID NO: 140, SEQ ID NO: 141, SEQ ID NO: 142, SEQ ID NO: 143, SEQ ID NO: 144, SEQ ID NO: 145, SEQ ID NO: 146, SEQ ID NO: 147, SEQ ID NO: 148, and SEQ ID NO: 149 as shown in Table 1.

[0403] An exemplary leader sequence is provided as SEQ ID NO: 1. An exemplary hinge/spacer sequence is provided as SEQ ID NO:2 or SEQ ID NO:3 or SEQ ID NO:4 or SEQ ID NO:5. An exemplary transmembrane domain sequence is provided as SEQ ID NO:6. An exemplary sequence of the intracellular signaling domain of the 4-1BB protein is provided as SEQ ID NO: 7. An exemplary sequence of the intracellular signaling domain of CD27 is provided as SEQ ID NO:8. An exemplary CD3zeta domain sequence is provided as SEQ ID NO: 9 or SEQ ID NO:10.

[0404] In one aspect, the present invention encompasses a recombinant nucleic acid construct comprising a nucleic acid molecule encoding a CAR, wherein the nucleic acid molecule comprises the nucleic acid sequence encoding an anti-BCMA binding domain, e.g., described herein, that is contiguous with and in the same reading frame as a nucleic acid sequence encoding an intracellular signaling domain. In one aspect, the anti-BCMA binding domain is selected from one or more of SEQ ID NO: 54, SEQ ID NO: 55, SEQ ID NO: 56, SEQ ID NO: 57, SEQ ID NO: 58, SEQ ID NO: 59, SEQ ID NO: 60, SEQ ID NO: 61, SEQ ID NO: 62, SEQ ID NO: 63, SEQ ID NO: 64, SEQ ID NO: 65, SEQ ID NO: 66, SEQ ID NO: 67, SEQ ID NO: 68, SEQ ID NO: 150, SEQ ID NO: 151, SEQ ID NO: 152, SEQ ID NO: 153, SEQ ID NO: 154, SEQ ID NO: 155, SEQ ID NO: 156, SEQ ID NO: 157, SEQ ID NO: 158, SEQ ID NO: 159, SEQ ID NO: 160, SEQ ID NO: 161, SEQ ID NO: 162, SEQ ID NO: 163, SEQ ID NO: 164, SEQ ID NO: 165, SEQ ID NO: 166, SEQ ID NO: 167, SEQ ID NO: 168, SEQ ID NO: 169, and SEQ ID NO: 170. In one aspect, the anti-BCMA binding domain comprises SEQ ID NO: 54. In one aspect, the anti-BCMA binding domain comprises SEQ ID NO: 55. In one aspect, the anti-BCMA binding domain comprises SEQ ID NO: 56. In one aspect, the anti-BCMA binding domain comprises SEQ ID NO: 57. In one aspect, the anti-BCMA binding domain comprises SEQ ID NO: 58. In one aspect, the anti-BCMA binding domain comprises SEQ ID NO: 59. In one aspect, the anti-BCMA binding domain comprises SEQ ID NO: 60. In one aspect, the anti-BCMA binding domain comprises SEQ ID NO: 61. In one aspect, the anti-BCMA binding domain comprises SEQ ID NO: 62. In one aspect, the anti-BCMA binding domain comprises SEQ ID NO: 63. In one aspect, the anti-BCMA binding domain comprises SEQ ID NO: 64. In one aspect, the anti-BCMA binding domain comprises SEQ ID NO: 65. In one aspect, the anti-BCMA binding domain comprises SEQ ID NO: 66. In one aspect, the anti-BCMA binding domain comprises SEQ ID NO: 67. In one aspect, the anti-BCMA binding domain comprises SEQ ID NO: 68. In one aspect, the anti-BCMA binding domain comprises SEQ ID NO: 150. In one aspect, the anti-BCMA binding domain comprises SEQ ID NO: 151. In one aspect, the anti-BCMA binding domain comprises SEQ ID NO: 152. In one aspect, the anti-BCMA binding domain comprises SEQ ID NO: 153. In one aspect, the anti-BCMA binding domain comprises SEQ ID NO: 154. In one aspect, the anti-BCMA binding domain comprises SEQ ID NO: 155. In one aspect, the anti-BCMA binding domain comprises SEQ ID NO: 156. In one aspect, the anti-BCMA binding domain comprises SEQ ID NO: 157. In one aspect, the anti-BCMA binding domain comprises SEQ ID NO: 158. In one aspect, the anti-BCMA binding domain comprises SEQ ID NO: 159. In one aspect, the anti-BCMA binding domain comprises SEQ ID NO: 160. In one aspect, the anti-BCMA binding domain comprises SEQ ID NO: 161. In one aspect, the anti-BCMA binding domain comprises SEQ ID NO: 162. In one aspect, the anti-BCMA binding domain comprises SEQ ID NO: 163. In one aspect, the anti-BCMA binding domain comprises SEQ ID NO: 164. In one aspect, the anti-BCMA binding domain comprises SEQ ID NO: 165. In one aspect, the anti-BCMA binding domain comprises SEQ ID NO: 166. In one aspect, the anti-BCMA binding domain comprises SEQ ID NO: 167. In one aspect, the anti-BCMA binding domain comprises SEQ ID NO: 168. In one aspect, the anti-BCMA binding domain comprises SEQ ID NO: 169. In one aspect, the anti-BCMA binding domain comprises SEQ ID NO: 170.

[0405] In one aspect, the present invention encompasses a recombinant nucleic acid construct comprising a nucleic acid molecule encoding a CAR, wherein the nucleic acid molecule comprises a nucleic acid sequence encoding an anti-BCMA binding domain selected from one or more of SEQ ID NO: 54, SEQ ID NO: 55, SEQ ID NO: 56, SEQ ID NO: 57, SEQ ID NO: 58, SEQ ID NO: 59, SEQ ID NO: 60, SEQ ID NO: 61, SEQ ID NO: 62, SEQ ID NO: 63, SEQ ID NO: 64, SEQ ID NO: 65, SEQ ID NO: 66, SEQ ID NO: 67, SEQ ID NO: 68, SEQ ID NO: 150, SEQ ID NO: 151, SEQ ID NO: 152, SEQ ID NO: 153, SEQ ID NO: 154, SEQ ID NO: 155, SEQ ID NO: 156, SEQ ID NO: 157, SEQ ID NO: 158, SEQ ID NO: 159, SEQ ID NO: 160, SEQ ID NO: 161, SEQ ID NO: 162, SEQ ID NO: 163, SEQ ID NO: 164, SEQ ID NO: 165, SEQ ID NO: 166, SEQ ID NO: 167, SEQ ID NO: 168, SEQ ID NO: 169, and SEQ ID NO: 170, e.g., wherein the sequence is contiguous with and in the same reading frame as the nucleic acid sequence encoding an intracellular signaling domain. An exemplary intracellular signaling domain that can be used in the CAR includes, but is not limited to, one or more intracellular signaling domains of, e.g., CD3-zeta, CD28, 4-1BB, and the like. In some instances, the CAR can comprise any combination of CD3-zeta, CD28, 4-1BB, and the like. In one aspect the nucleic acid sequence of a CAR construct of the invention is selected from one or more of SEQ ID NO: 114, SEQ ID NO: 115, SEQ ID NO: 116, SEQ ID NO: 117, SEQ ID NO: 118, SEQ ID NO: 119, SEQ ID NO: 120, SEQ ID NO: 121, SEQ ID NO: 122, SEQ ID NO: 123, SEQ ID NO: 124, SEQ ID NO: 125, SEQ ID NO: 126, SEQ ID NO: 127, SEQ ID NO: 128, SEQ ID NO: 234, SEQ ID NO: 235, SEQ ID NO: 236, SEQ ID NO: 237, SEQ ID NO: 238, SEQ ID NO: 239, SEQ ID NO: 240, SEQ ID NO: 241, SEQ ID NO: 242, SEQ ID NO: 243, SEQ ID NO: 244, SEQ ID NO: 245, SEQ ID NO: 246, SEQ ID NO: 247, SEQ ID NO: 248, SEQ ID NO: 249, SEQ ID NO: 250, SEQ ID NO: 251, SEQ ID NO: 252, SEQ ID NO: 253, or SEQ ID NO: 254. In one aspect the nucleic acid sequence of a CAR construct is SEQ ID NO: 114. In one aspect the nucleic acid sequence of a CAR construct is SEQ ID NO: 115. In one aspect the nucleic acid sequence of a CAR construct is SEQ ID NO: 116. In one aspect the nucleic acid sequence of a CAR construct is SEQ ID NO: 117. In one aspect the nucleic acid sequence of a CAR construct is SEQ ID NO: 118. In one aspect the nucleic acid sequence of a CAR construct is SEQ ID NO: 119. In one aspect the nucleic acid sequence of a CAR construct is SEQ ID NO: 120. In one aspect the nucleic acid sequence of a CAR construct is SEQ ID NO: 121. In one aspect the nucleic acid sequence of a CAR construct is SEQ ID NO: 122. In one aspect the nucleic acid sequence of a CAR construct is SEQ ID NO: 123. In one aspect the nucleic acid sequence of a CAR construct is SEQ ID NO: 124. In one aspect the nucleic acid sequence of a CAR construct is SEQ ID NO: 125. In one aspect the nucleic acid sequence of a CAR construct is SEQ ID NO: 126. In one aspect the nucleic acid sequence of a CAR construct is SEQ ID NO: 127. In one aspect the nucleic acid sequence of a CAR construct is SEQ ID NO: 128. In one aspect the nucleic acid sequence of a CAR construct is SEQ ID NO: 234. In one aspect the nucleic acid sequence of a CAR construct is SEQ ID NO: 235. In one aspect the nucleic acid sequence of a CAR construct is SEQ ID NO: 236. In one aspect the nucleic acid sequence of a CAR construct is SEQ ID NO: 237. In one aspect the nucleic acid sequence of a CAR construct is SEQ ID NO: 238. In one aspect the nucleic acid sequence of a CAR construct is SEQ ID NO: 239. In one aspect the nucleic acid sequence of a CAR construct is SEQ ID NO: 240. In one aspect the nucleic acid sequence of a CAR construct is SEQ ID NO: 241. In one aspect the nucleic acid sequence of a CAR construct is SEQ ID NO: 242. In one aspect the nucleic acid sequence of a CAR construct is SEQ ID NO: 243. In one aspect the nucleic acid sequence of a CAR construct is SEQ ID NO: 244. In one aspect the nucleic acid sequence of a CAR construct is SEQ ID NO: 245. In one aspect the nucleic acid sequence of a CAR construct is SEQ ID NO: 246. In one aspect the nucleic acid sequence of a CAR construct is SEQ ID NO: 247. In one aspect the nucleic acid sequence of a CAR construct is SEQ ID NO: 248. In one aspect the nucleic acid sequence of a CAR construct is SEQ ID NO: 249. In one aspect the nucleic acid sequence of a CAR construct is SEQ ID NO: 250. In one aspect the nucleic acid sequence of a CAR construct is SEQ ID NO: 251. In one aspect the nucleic acid sequence of a CAR construct is SEQ ID NO: 252. In one aspect the nucleic acid sequence of a CAR construct is SEQ ID NO: 253. In one aspect the nucleic acid sequence of a CAR construct is SEQ ID NO: 254.

[0406] The nucleic acid sequences coding for the desired molecules can be obtained using recombinant methods known in the art, such as, for example by screening libraries from cells expressing the gene, by deriving the gene from a vector known to include the same, or by isolating directly from cells and tissues containing the same, using standard techniques. Alternatively, the nucleic acid of interest can be produced synthetically, rather than cloned.

[0407] The present invention includes retroviral and lentiviral vector constructs expressing a CAR that can be directly transduced into a cell.

[0408] The present invention also includes an RNA construct that can be directly transfected into a cell. A method for generating mRNA for use in transfection involves in vitro transcription (IVT) of a template with specially designed primers, followed by polyA addition, to produce a construct containing 3′ and 5′ untranslated sequence (“UTR”), a 5′ cap and/or Internal Ribosome Entry Site (IRES), the nucleic acid to be expressed, and a polyA tail, typically 50-2000 bases in length (SEQ ID NO:35). RNA so produced can efficiently transfect different kinds of cells. In one embodiment, the template includes sequences for the CAR. In an embodiment, an RNA CAR vector is transduced into a cell, e.g., T cell or NK cell, by electroporation.

### Antigen Binding Domain

[0409] The CARs of the present invention comprise a target-specific binding domain. The choice of moiety depends upon the type and number of ligands that define the surface of a target cell. For example, the antigen binding domain may be chosen to recognize an antigen that acts as a cell surface marker on target cells associated with a particular disease state.

[0410] In one aspect, the CAR-mediated T-cell response can be directed to an antigen of interest by way of engineering an antigen binding domain that specifically binds a desired antigen into the CAR.

[0411] In one aspect, the CAR of the present invention comprises a binding domain that specifically binds BCMA. In one aspect, the CAR of the present invention comprises an antigen binding domain that specifically binds human BCMA.

[0412] The antigen binding domain can be any protein that binds to the antigen including but not limited to a monoclonal antibody, a polyclonal antibody, a recombinant antibody, a human antibody, a humanized antibody, and a functional fragment thereof, including but not limited to a single-domain antibody such as a heavy chain variable domain (VH), a light chain variable domain (VL) and a variable domain (VHH) of camelid derived nanobody, and to an alternative scaffold known in the art to function as antigen binding domain, such as a recombinant fibronectin domain, and the like. In some instances, it is beneficial for the antigen binding domain to be derived from the same species in which the CAR will ultimately be used in. For example, for use in humans, it may be beneficial for the antigen binding domain of the CAR to comprise human or humanized residues for the antigen binding domain of an antibody or antibody fragment.

[0413] Thus, in one aspect, the antigen binding domain comprises a human or a humanized antibody or an antibody fragment. In one embodiment, the human anti-BCMA binding domain comprises one or more (e.g., all three) light chain complementary determining region 1 (LC CDR1), light chain complementary determining region 2 (LC CDR2), and light chain complementary determining region 3 (LC CDR3) of a human anti-BCMA binding domain described herein, and/or one or more (e.g., all three) heavy chain complementary determining region 1 (HC CDR1), heavy chain complementary determining region 2 (HC CDR2), and heavy chain complementary determining region 3 (HC CDR3) of a human anti-BCMA binding domain described herein, e.g., a human anti-BCMA binding domain comprising one or more, e.g., all three, LC CDRs and one or more, e.g., all three, HC CDRs. In one embodiment, the human anti-BCMA binding domain comprises one or more (e.g., all three) heavy chain complementary determining region 1 (HC CDR1), heavy chain complementary determining region 2 (HC CDR2), and heavy chain complementary determining region 3 (HC CDR3) of a human anti-BCMA binding domain described herein, e.g., the human anti-BCMA binding domain has two variable heavy chain regions, each comprising a HC CDR1, a HC CDR2 and a HC CDR3 described herein. In one embodiment, the human anti-BCMA binding domain comprises a human light chain variable region described herein (e.g., in Table 1) and/or a human heavy chain variable region described herein (e.g., in Table 1). In one embodiment, the human anti-BCMA binding domain comprises a human heavy chain variable region described herein (e.g., in Table 1), e.g., at least two human heavy chain variable regions described herein (e.g., in Table 1). In one embodiment, the anti-BCMA binding domain is a scFv comprising a light chain and a heavy chain of an amino acid sequence of Table 1. In an embodiment, the anti-BCMA binding domain (e.g., an scFv) comprises: a light chain variable region comprising an amino acid sequence having at least one, two or three modifications (e.g., substitutions, e.g., conservative substitutions) but not more than 30, 20 or 10 modifications (e.g., substitutions, e.g., conservative substitutions) of an amino acid sequence of a light chain variable region provided in Table 1, or a sequence with 95-99% identity with an amino acid sequence of Table 11; and/or a heavy chain variable region comprising an amino acid sequence having at least one, two or three modifications (e.g., substitutions, e.g., conservative substitutions) but not more than 30, 20 or 10 modifications (e.g., substitutions, e.g., conservative substitutions) of an amino acid sequence of a heavy chain variable region provided in Table 1, or a sequence with 95-99% identity to an amino acid sequence of Table 1.

[0414] In one embodiment, the human anti-BCMA binding domain comprises a sequence selected from a group consisting of SEQ ID NO: 39, SEQ ID NO: 40, SEQ ID NO: 41, SEQ ID NO: 42, SEQ ID NO: 43, SEQ ID NO: 44, SEQ ID NO: 45, SEQ ID NO: 46, SEQ ID NO: 47, SEQ ID NO: 48, SEQ ID NO: 49, SEQ ID NO: 50, SEQ ID NO: 51, SEQ ID NO: 52, SEQ ID NO: 53, SEQ ID NO: 129, SEQ ID NO: 130, SEQ ID NO: 131, SEQ ID NO: 132, SEQ ID NO: 133, SEQ ID NO: 134, SEQ ID NO: 135, SEQ ID NO: 136, SEQ ID NO: 137, SEQ ID NO: 138, SEQ ID NO: 139, SEQ ID NO: 140, SEQ ID NO: 141, SEQ ID NO: 142, SEQ ID NO: 143, SEQ ID NO: 144, SEQ ID NO: 145, SEQ ID NO: 146, SEQ ID NO: 147, SEQ ID NO: 148, and SEQ ID NO: 149, or a sequence with 95-99% identify thereof. In one embodiment, the nucleic acid sequence encoding the human anti-BCMA binding domain comprises a sequence selected from a group consisting of SEQ ID NO: 54, SEQ ID NO: 55, SEQ ID NO: 56, SEQ ID NO: 57, SEQ ID NO: 58, SEQ ID NO: 59, SEQ ID NO: 60, SEQ ID NO: 61, SEQ ID NO: 62, SEQ ID NO: 63, SEQ ID NO: 64, SEQ ID NO: 65, SEQ ID NO: 66, SEQ ID NO: 67, SEQ ID NO: 68, SEQ ID NO: 150, SEQ ID NO: 151, SEQ ID NO: 152, SEQ ID NO: 153, SEQ ID NO: 154, SEQ ID NO: 155, SEQ ID NO: 156, SEQ ID NO: 157, SEQ ID NO: 158, SEQ ID NO: 159, SEQ ID NO: 160, SEQ ID NO: 161, SEQ ID NO: 162, SEQ ID NO: 163, SEQ ID NO: 164, SEQ ID NO: 165, SEQ ID NO: 166, SEQ ID NO: 167, SEQ ID NO: 168, SEQ ID NO: 169, and SEQ ID NO: 170, or a sequence with 95-99% identify thereof. In one embodiment, the human anti-BCMA binding domain is a scFv, and a light chain variable region comprising an amino acid sequence described herein, e.g., in Table 1, is attached to a heavy chain variable region comprising an amino acid sequence described herein, e.g., in Table 1, via a linker, e.g., a linker described herein. In one embodiment, the human anti-BCMA binding domain includes a (Gly4-Ser)n linker, wherein n is 1, 2, 3, 4, 5, or 6, preferably 3 or 4 (SEQ ID NO:26). The light chain variable region and heavy chain variable region of a scFv can be, e.g., in any of the following orientations: light chain variable region-linker-heavy chain variable region or heavy chain variable region-linker-light chain variable region. In one aspect, the antigen binding domain portion comprises one or more sequence selected from SEQ ID NO: 39, SEQ ID NO: 40, SEQ ID NO: 41, SEQ ID NO: 42, SEQ ID NO: 43, SEQ ID NO: 44, SEQ ID NO: 45, SEQ ID NO: 46, SEQ ID NO: 47, SEQ ID NO: 48, SEQ ID NO: 49, SEQ ID NO: 50, SEQ ID NO: 51, SEQ ID NO: 52, SEQ ID NO: 53, SEQ ID NO: 129, SEQ ID NO: 130, SEQ ID NO: 131, SEQ ID NO: 132, SEQ ID NO: 133, SEQ ID NO: 134, SEQ ID NO: 135, SEQ ID NO: 136, SEQ ID NO: 137, SEQ ID NO: 138, SEQ ID NO: 139, SEQ ID NO: 140, SEQ ID NO: 141, SEQ ID NO: 142, SEQ ID NO: 143, SEQ ID NO: 144, SEQ ID NO: 145, SEQ ID NO: 146, SEQ ID NO: 147, SEQ ID NO: 148, and SEQ ID NO: 149. In one aspect the CAR is selected from one or more sequence selected from residues 22-483 of SEQ ID NO: 109, residues 22-490 of SEQ ID NO: 99, residues 22-488 of SEQ ID NO: 100, residues 22-487 of SEQ ID NO: 101, residues 22-493 of SEQ ID NO: 102, residues 22-490 of SEQ ID NO: 103, residues 22-491 of SEQ ID NO: 104, residues 22-482 of SEQ ID NO: 105, residues 22-483 of SEQ ID NO: 106, residues 22-485 of SEQ ID NO: 107, residues 22-483 of SEQ ID NO: 108, residues 22-490 of SEQ ID NO: 110, residues 22-483 of SEQ ID NO: 111, residues 22-484 of SEQ ID NO: 112, residues 22-485 of SEQ ID NO: 113, residues 22-487 of SEQ ID NO: 213, residues 23-489 of SEQ ID NO: 214, residues 22-490 of SEQ ID NO: 215, residues 22-484 of SEQ ID NO: 216, residues 22-485 of SEQ ID NO: 217, residues 22-489 of SEQ ID NO: 218, residues 22-497 of SEQ ID NO: 219, residues 22-492 of SEQ ID NO: 220, residues 22-490 of SEQ ID NO: 221, residues 22-485 of SEQ ID NO: 222, residues 22-492 of SEQ ID NO: 223, residues 22-492 of SEQ ID NO: 224, residues 22-483 of SEQ ID NO: 225, residues 22-490 of SEQ ID NO: 226, residues 22-485 of SEQ ID NO: 227, residues 22-486 of SEQ ID NO: 228, residues 22-492 of SEQ ID NO: 229, residues 22-488 of SEQ ID NO: 230, residues 22-488 of SEQ ID NO: 231, residues 22-495 of SEQ ID NO: 232, residues 22-490 of SEQ ID NO: 233.

[0415] In one embodiment, the anti-BCMA binding domain comprises a light chain variable region described herein (e.g., in Table 16) and/or a heavy chain variable region described herein (e.g., in Table 16). In one embodiment, the encoded humanized anti-BCMA binding domain comprises a light chain variable region provided in SEQ ID NO: 259, SEQ ID NO: 260, SEQ ID NO: 261, SEQ ID NO: 262, and/or a heavy chain variable region provided in SEQ ID NO: 255, SEQ ID NO: 256, SEQ ID NO: 257, SEQ ID NO: 258. In one embodiment, the encoded anti-BCMA binding domain is a scFv comprising a light chain and a heavy chain of an amino acid sequence of Table 16. In an embodiment, the human or humanized anti-BCMA binding domain (e.g., an scFv) comprises: a light chain variable region comprising an amino acid sequence having at least one, two or three modifications (e.g., substitutions, e.g., conservative substitutions) but not more than 30, 20 or 10 modifications (e.g., substitutions, e.g., conservative substitutions) of an amino acid sequence of a light chain variable region provided in SEQ ID NO: 259, SEQ ID NO: 260, SEQ ID NO: 261, SEQ ID NO: 262, or a sequence with 95-99% identity thereof; and/or a heavy chain variable region comprising an amino acid sequence having at least one, two or three modifications (e.g., substitutions, e.g., conservative substitutions) but not more than 30, 20 or 10 modifications (e.g., substitutions, e.g., conservative substitutions) of an amino acid sequence of a heavy chain variable region provided in SEQ ID NO: 255, SEQ ID NO: 256, SEQ ID NO: 257, SEQ ID NO: 258, or a sequence with 95-99% identity thereof. In one embodiment, the encoded anti-BCMA binding domain includes a (Gly4-Ser)n linker, wherein n is 1, 2, 3, 4, 5, or 6, preferably 3 or 4 (SEQ ID NO:26). The light chain variable region and heavy chain variable region of a scFv can be, e.g., in any of the following orientations: light chain variable region-linker-heavy chain variable region or heavy chain variable region-linker-light chain variable region.

[0416] In one embodiment, the human anti-BCMA binding domain comprises a sequence selected from a group consisting of SEQ ID NO: 263, SEQ ID NO: 264, SEQ ID NO: 265, and SEQ ID NO: 266, or a sequence with 95-99% identity thereof.

[0417] In some aspects, a non-human antibody is humanized, where specific sequences or regions of the antibody are modified to increase similarity to an antibody naturally produced in a human or fragment thereof. In one aspect, the antigen binding domain is humanized.

[0418] A humanized antibody can be produced using a variety of techniques known in the art, including but not limited to, CDR-grafting (see, e.g., European Patent No. EP 239,400; International Publication No. WO 91/09967; and U.S. Pat. Nos. 5,225,539, 5,530,101, and 5,585,089, each of which is incorporated herein in its entirety by reference), veneering or resurfacing (see, e.g., European Patent Nos. EP 592,106 and EP 519,596; Padlan, 1991, Molecular Immunology, 28(4/5):489-498; Studnicka et al., 1994, Protein Engineering, 7(6):805-814; and Roguska et al., 1994, PNAS, 91:969-973, each of which is incorporated herein by its entirety by reference), chain shuffling (see, e.g., U.S. Pat. No. 5,565,332, which is incorporated herein in its entirety by reference), and techniques disclosed in, e.g., U.S. Patent Application Publication No. US2005/0042664, U.S. Patent Application Publication No. US2005/0048617, U.S. Pat. Nos. 6,407,213, 5,766,886, International Publication No. WO 9317105, Tan et al., J. Immunol., 169:1119-25 (2002), Caldas et al., Protein Eng., 13(5):353-60 (2000), Morea et al., Methods, 20(3):267-79 (2000), Baca et al., J. Biol. Chem., 272(16):10678-84 (1997), Roguska et al., Protein Eng., 9(10):895-904 (1996), Couto et al., Cancer Res., 55 (23 Supp):5973s-5977s (1995), Couto et al., Cancer Res., 55(8):1717-22 (1995), Sandhu J S, Gene, 150(2):409-10 (1994), and Pedersen et al., J. Mol. Biol., 235(3):959-73 (1994), each of which is incorporated herein in its entirety by reference. Often, framework residues in the framework regions will be substituted with the corresponding residue from the CDR donor antibody to alter, for example improve, antigen binding. These framework substitutions, e.g., conservative substitutions are identified by methods well-known in the art, e.g., by modeling of the interactions of the CDR and framework residues to identify framework residues important for antigen binding and sequence comparison to identify unusual framework residues at particular positions. (See, e.g., Queen et al., U.S. Pat. No. 5,585,089; and Riechmann et al., 1988, Nature, 332:323, which are incorporated herein by reference in their entireties.)

[0419] A humanized antibody or antibody fragment has one or more amino acid residues remaining in it from a source which is nonhuman. These nonhuman amino acid residues are often referred to as “import” residues, which are typically taken from an “import” variable domain. As provided herein, humanized antibodies or antibody fragments comprise one or more CDRs from nonhuman immunoglobulin molecules and framework regions wherein the amino acid residues comprising the framework are derived completely or mostly from human germline Multiple techniques for humanization of antibodies or antibody fragments are well-known in the art and can essentially be performed following the method of Winter and co-workers (Jones et al., Nature, 321:522-525 (1986); Riechmann et al., Nature, 332:323-327 (1988); Verhoeyen et al., Science, 239:1534-1536 (1988)), by substituting rodent CDRs or CDR sequences for the corresponding sequences of a human antibody, i.e., CDR-grafting (EP 239,400; PCT Publication No. WO 91/09967; and U.S. Pat. Nos. 4,816,567; 6,331,415; 5,225,539; 5,530,101; 5,585,089; 6,548,640, the contents of which are incorporated herein by reference herein in their entirety). In such humanized antibodies and antibody fragments, substantially less than an intact human variable domain has been substituted by the corresponding sequence from a nonhuman species. Humanized antibodies are often human antibodies in which some CDR residues and possibly some framework (FR) residues are substituted by residues from analogous sites in rodent antibodies. Humanization of antibodies and antibody fragments can also be achieved by veneering or resurfacing (EP 592,106; EP 519,596; Padlan, 1991, Molecular Immunology, 28(4/5):489-498; Studnicka et al., Protein Engineering, 7(6):805-814 (1994); and Roguska et al., PNAS, 91:969-973 (1994)) or chain shuffling (U.S. Pat. No. 5,565,332), the contents of which are incorporated herein by reference herein in their entirety.

[0420] The choice of human variable domains, both light and heavy, to be used in making the humanized antibodies is to reduce antigenicity. According to the so-called “best-fit” method, the sequence of the variable domain of a rodent antibody is screened against the entire library of known human variable-domain sequences. The human sequence which is closest to that of the rodent is then accepted as the human framework (FR) for the humanized antibody (Sims et al., J. Immunol., 151:2296 (1993); Chothia et al., J. Mol. Biol., 196:901 (1987), the contents of which are incorporated herein by reference herein in their entirety). Another method uses a particular framework derived from the consensus sequence of all human antibodies of a particular subgroup of light or heavy chains. The same framework may be used for several different humanized antibodies (see, e.g., Nicholson et al. Mol. Immun 34 (16-17): 1157-1165 (1997); Carter et al., Proc. Natl. Acad. Sci. USA, 89:4285 (1992); Presta et al., J. Immunol., 151:2623 (1993), the contents of which are incorporated herein by reference herein in their entirety). In some embodiments, the framework region, e.g., all four framework regions, of the heavy chain variable region are derived from a VH4_4-59 germline sequence. In one embodiment, the framework region can comprise, one, two, three, four or five modifications, e.g., substitutions, e.g., conservative substitutions, e.g., from the amino acid at the corresponding murine sequence. In one embodiment, the framework region, e.g., all four framework regions of the light chain variable region are derived from a VK3_1.25 germline sequence. In one embodiment, the framework region can comprise, one, two, three, four or five modifications, e.g., substitutions, e.g., conservative substitutions, e.g., from the amino acid at the corresponding murine sequence.

[0421] In some aspects, the portion of a CAR composition of the invention that comprises an antibody fragment is humanized with retention of high affinity for the target antigen and other favorable biological properties. According to one aspect of the invention, humanized antibodies and antibody fragments are prepared by a process of analysis of the parental sequences and various conceptual humanized products using three-dimensional models of the parental and humanized sequences. Three-dimensional immunoglobulin models are commonly available and are familiar to those skilled in the art. Computer programs are available which illustrate and display probable three-dimensional conformational structures of selected candidate immunoglobulin sequences. Inspection of these displays permits analysis of the likely role of the residues in the functioning of the candidate immunoglobulin sequence, e.g., the analysis of residues that influence the ability of the candidate immunoglobulin to bind the target antigen. In this way, FR residues can be selected and combined from the recipient and import sequences so that the desired antibody or antibody fragment characteristic, such as increased affinity for the target antigen, is achieved. In general, the CDR residues are directly and most substantially involved in influencing antigen binding.

[0422] A humanized antibody or antibody fragment may retain a similar antigenic specificity as the original antibody, e.g., in the present invention, the ability to bind human BCMA In some embodiments, a humanized antibody or antibody fragment may have improved affinity and/or specificity of binding to human BCMA.

[0423] In one embodiment, the humanized anti-BCMA binding domain of the CAR, comprises one or more (e.g., all three) light chain complementary determining region 1 (LC CDR1), light chain complementary determining region 2 (LC CDR2), and light chain complementary determining region 3 (LC CDR3) of a humanized anti-BCMA binding domain described herein, and/or one or more (e.g., all three) heavy chain complementary determining region 1 (HC CDR1), heavy chain complementary determining region 2 (HC CDR2), and heavy chain complementary determining region 3 (HC CDR3) of a humanized anti-BCMA binding domain described herein, e.g., a humanized anti-BCMA binding domain comprising one or more, e.g., all three, LC CDRs and one or more, e.g., all three, HC CDRs. In one embodiment, the humanized anti-BCMA binding domain comprises one or more (e.g., all three) heavy chain complementary determining region 1 (HC CDR1), heavy chain complementary determining region 2 (HC CDR2), and heavy chain complementary determining region 3 (HC CDR3) of a humanized anti-BCMA binding domain described herein, e.g., the humanized anti-BCMA binding domain has two variable heavy chain regions, each comprising a HC CDR1, a HC CDR2 and a HC CDR3 described herein. In one embodiment, the humanized anti-BCMA binding domain comprises a humanized light chain variable region described herein (e.g., SEQ ID NO:255 or 257) and/or a human heavy chain variable region described herein (e.g., SEQ ID NO:255 or 257).

[0424] In one aspect, the anti-BCMA binding domain is characterized by particular functional features or properties of an antibody or antibody fragment. For example, in one aspect, the portion of a CAR composition of the invention that comprises an antigen binding domain specifically binds human BCMA

[0425] In one aspect, the antigen binding domain has the same or a similar binding specificity to human BCMA as mouse BCMA. In one aspect, the invention relates to an antigen binding domain comprising an antibody or antibody fragment, wherein the antibody binding domain specifically binds to a BCMA protein or fragment thereof, wherein the antibody or antibody fragment comprises a variable light chain and/or a variable heavy chain that includes an amino acid sequence of SEQ ID NO: 39, SEQ ID NO: 40, SEQ ID NO: 41, SEQ ID NO: 42, SEQ ID NO: 43, SEQ ID NO: 44, SEQ ID NO: 45, SEQ ID NO: 46, SEQ ID NO: 47, SEQ ID NO: 48, SEQ ID NO: 49, SEQ ID NO: 50, SEQ ID NO: 51, SEQ ID NO: 52, SEQ ID NO: 53, SEQ ID NO: 129, SEQ ID NO: 130, SEQ ID NO: 131, SEQ ID NO: 132, SEQ ID NO: 133, SEQ ID NO: 134, SEQ ID NO: 135, SEQ ID NO: 136, SEQ ID NO: 137, SEQ ID NO: 138, SEQ ID NO: 139, SEQ ID NO: 140, SEQ ID NO: 141, SEQ ID NO: 142, SEQ ID NO: 143, SEQ ID NO: 144, SEQ ID NO: 145, SEQ ID NO: 146, SEQ ID NO: 147, SEQ ID NO: 148, or SEQ ID NO: 149. In one aspect, the antigen binding domain comprises an amino acid sequence of an scFv selected from SEQ ID NO: 39, SEQ ID NO: 40, SEQ ID NO: 41, SEQ ID NO: 42, SEQ ID NO: 43, SEQ ID NO: 44, SEQ ID NO: 45, SEQ ID NO: 46, SEQ ID NO: 47, SEQ ID NO: 48, SEQ ID NO: 49, SEQ ID NO: 50, SEQ ID NO: 51, SEQ ID NO: 52, SEQ ID NO: 53, SEQ ID NO: 129, SEQ ID NO: 130, SEQ ID NO: 131, SEQ ID NO: 132, SEQ ID NO: 133, SEQ ID NO: 134, SEQ ID NO: 135, SEQ ID NO: 136, SEQ ID NO: 137, SEQ ID NO: 138, SEQ ID NO: 139, SEQ ID NO: 140, SEQ ID NO: 141, SEQ ID NO: 142, SEQ ID NO: 143, SEQ ID NO: 144, SEQ ID NO: 145, SEQ ID NO: 146, SEQ ID NO: 147, SEQ ID NO: 148, or SEQ ID NO: 149. In certain aspects, the scFv is contiguous with and in the same reading frame as a leader sequence. In one aspect the leader sequence is the polypeptide sequence provided as SEQ ID NO:1.

[0426] In one aspect, the anti-BCMA binding domain is a fragment, e.g., a single chain variable fragment (scFv). In one aspect, the anti-BCMA binding domain is a Fv, a Fab, a (Fab′)2, or a bi-functional (e.g. bi-specific) hybrid antibody (e.g., Lanzavecchia et al., Eur. J. Immunol. 17, 105 (1987)). In one aspect, the antibodies and fragments thereof of the invention binds a BCMA protein with wild-type or enhanced affinity.

[0427] In some instances, scFvs can be prepared according to method known in the art (see, for example, Bird et al., (1988) Science 242:423-426 and Huston et al., (1988) Proc. Natl. Acad. Sci. USA 85:5879-5883). ScFv molecules can be produced by linking VH and VL regions together using flexible polypeptide linkers. The scFv molecules comprise a linker (e.g., a Ser-Gly linker) with an optimized length and/or amino acid composition. The linker length can greatly affect how the variable regions of a scFv fold and interact. In fact, if a short polypeptide linker is employed (e.g., between 5-10 amino acids) intrachain folding is prevented. Interchain folding is also required to bring the two variable regions together to form a functional epitope binding site. For examples of linker orientation and size see, e.g., Hollinger et al. 1993 Proc Natl Acad. Sci. U.S.A. 90:6444-6448, U.S. Patent Application Publication Nos. 2005/0100543, 2005/0175606, 2007/0014794, and PCT publication Nos. WO2006/020258 and WO2007/024715, is incorporated herein by reference.

[0428] An scFv can comprise a linker of at least 1, 2, 3, 4, 5, 6, 7, 8, 9, 10, 11, 12, 13, 14, 15, 16, 17, 18, 19, 20, 25, 30, 35, 40, 45, 50, or more amino acid residues between its VL and VH regions. The linker sequence may comprise any naturally occurring amino acid. In some embodiments, the linker sequence comprises amino acids glycine and serine. In another embodiment, the linker sequence comprises sets of glycine and serine repeats such as (Gly4Ser)n, where n is a positive integer equal to or greater than 1 (SEQ ID NO:25). In one embodiment, the linker can be (Gly4Ser)4 (SEQ ID NO:27) or (Gly4Ser)3(SEQ ID NO:28). Variation in the linker length may retain or enhance activity, giving rise to superior efficacy in activity studies.

[0429] Exemplary Human BCMA CAR Constructs and Antigen Binding Domains

[0430] Exemplary BCMA CAR constructs disclose herein comprise an scFv (e.g., a scFv as disclosed in Tables 1 or 16, optionally preceded with an optional leader sequence (e.g., SEQ ID NO:1 and SEQ ID NO:12 for exemplary leader amino acid and nucleotide sequences, respectively). The sequences of the scFv fragments (SEQ ID NOs: 39-53, 129-149, or 263-266, not including the optional leader sequence) are provided herein in Tables 1 or 16. The BCMA CAR construct can further include an optional hinge domain, e.g., a CD8 hinge domain (e.g., including the amino acid sequence of SEQ ID NO: 2 or encoded by a nucleic acid sequence of SEQ ID NO:13); a transmembrane domain, e.g., a CD8 transmembrane domain (e.g., including the amino acid sequence of SEQ ID NO: 6 or encoded by the nucleotide sequence of SEQ ID NO: 17); an intracellular domain, e.g., a 4-1BB intracellular domain (e.g., including the amino acid sequence of SEQ ID NO: 7 or encoded by the nucleotide sequence of SEQ ID NO: 18; and a functional signaling domain, e.g., a CD3 zeta domain (e.g., including amino acid sequence of SEQ ID NO: 9 or 10, or encoded by the nucleotide sequence of SEQ ID NO: 20 or 21). In certain embodiments, the domains are contiguous with and in the same reading frame to form a single fusion protein. In other embodiments, the domain are in separate polypeptides, e.g., as in an RCAR molecule as described herein.

[0431] In certain embodiments, the full length BCMA CAR molecule includes the amino acid sequence of, or is encoded by the nucleotide sequence of, BCMA-1, BCMA-2, BCMA-3, BCMA-4, BCMA-5, BCMA-6, BCMA-7, BCMA-8, BCMA-9, BCMA-10, BCMA-11, BCMA-12, BCMA-13, BCMA-14, BCMA-15, 149362, 149363, 149364, 149365, 149366, 149367, 149368, 149369, BCMA_EBB-C1978-A4, BCMA_EBB-C1978-G1, BCMA_EBB-C1979-C1, BCMA_EBB-C1978-C7, BCMA_EBB-C1978-D10, BCMA_EBB-C1979-C12, BCMA_EBB-C1980-G4, BCMA_EBB-C1980-D2, BCMA_EBB-C1978-A10, BCMA_EBB-C1978-D4, BCMA_EBB-C1980-A2, BCMA_EBB-C1981-C3, BCMA_EBB-C1978-G4, A7D12.2, C11D5.3, C12A3.2, or C13F12.1 provided in Table 1 or 16, or a sequence substantially (e.g., 95-99%) identical thereto.

[0432] In certain embodiments, the BCMA CAR molecule, or the anti-BCMA antigen binding domain, includes the scFv amino acid sequence of BCMA-1, BCMA-2, BCMA-3, BCMA-4, BCMA-5, BCMA-6, BCMA-7, BCMA-8, BCMA-9, BCMA-10, BCMA-11, BCMA-12, BCMA-13, BCMA-14, BCMA-15, 149362, 149363, 149364, 149365, 149366, 149367, 149368, 149369, BCMA_EBB-C1978-A4, BCMA_EBB-C1978-G1, BCMA_EBB-C1979-C1, BCMA_EBB-C1978-C7, BCMA_EBB-C1978-D10, BCMA_EBB-C1979-C12, BCMA_EBB-C1980-G4, BCMA_EBB-C1980-D2, BCMA_EBB-C1978-A10, BCMA_EBB-C1978-D4, BCMA_EBB-C1980-A2, BCMA_EBB-C1981-C3, BCMA_EBB-C1978-G4, A7D12.2, C11D5.3, C12A3.2, or C13F12.1 provided in Table 1 or 16 (with or without the leader sequence), or a sequence substantially identical (e.g., 95-99% identical, or up to 20, 15, 10, 8, 6, 5, 4, 3, 2, or 1 amino acid changes, e.g., substitutions (e.g., conservative substitutions)) to any of the aforesaid sequences.

[0433] In certain embodiments, the BCMA CAR molecule, or the anti-BCMA antigen binding domain, includes the heavy chain variable region and/or the light chain variable region of BCMA-1, BCMA-2, BCMA-3, BCMA-4, BCMA-5, BCMA-6, BCMA-7, BCMA-8, BCMA-9, BCMA-10, BCMA-11, BCMA-12, BCMA-13, BCMA-14, BCMA-15, 149362, 149363, 149364, 149365, 149366, 149367, 149368, 149369, BCMA_EBB-C1978-A4, BCMA_EBB-C1978-G1, BCMA_EBB-C1979-C1, BCMA_EBB-C1978-C7, BCMA_EBB-C1978-D10, BCMA_EBB-C1979-C12, BCMA_EBB-C1980-G4, BCMA_EBB-C1980-D2, BCMA_EBB-C1978-A10, BCMA_EBB-C1978-D4, BCMA_EBB-C1980-A2, BCMA_EBB-C1981-C3, BCMA_EBB-C1978-G4, A7D12.2, C11D5.3, C12A3.2, or C13F12.1 provided in Table 1 or 16, or a sequence substantially identical (e.g., 95-99% identical, or up to 20, 15, 10, 8, 6, 5, 4, 3, 2, or 1 amino acid changes, e.g., substitutions (e.g., conservative substitutions)) to any of the aforesaid sequences.

[0434] In certain embodiments, the BCMA CAR molecule, or the anti-BCMA antigen binding domain, includes one, two or three CDRs from the heavy chain variable region (e.g., HCDR1, HCDR2 and/or HCDR3), provided in Table 20; and/or one, two or three CDRs from the light chain variable region (e.g., LCDR1, LCDR2 and/or LCDR3) of BCMA-1, BCMA-2, BCMA-3, BCMA-4, BCMA-5, BCMA-6, BCMA-7, BCMA-8, BCMA-9, BCMA-10, BCMA-11, BCMA-12, BCMA-13, BCMA-14, BCMA-15, 149362, 149363, 149364, 149365, 149366, 149367, 149368, 149369, BCMA_EBB-C1978-A4, BCMA_EBB-C1978-G1, BCMA_EBB-C1979-C1, BCMA_EBB-C1978-C7, BCMA_EBB-C1978-D10, BCMA_EBB-C1979-C12, BCMA_EBB-C1980-G4, BCMA_EBB-C1980-D2, BCMA_EBB-C1978-A10, BCMA_EBB-C1978-D4, BCMA_EBB-C1980-A2, BCMA_EBB-C1981-C3, BCMA_EBB-C1978-G4, A7D12.2, C11D5.3, C12A3.2, or C13F12.1, provided in Table 21; or a sequence substantially identical (e.g., 95-99% identical, or up to 20, 15, 10, 8, 6, 5, 4, 3, 2, or 1 amino acid changes, e.g., substitutions (e.g., conservative substitutions)) to any of the aforesaid sequences.

[0435] In certain embodiments, the BCMA CAR molecule, or the anti-BCMA antigen binding domain, includes one, two or three CDRs from the heavy chain variable region (e.g., HCDR1, HCDR2 and/or HCDR3), provided in Table 22; and/or one, two or three CDRs from the light chain variable region (e.g., LCDR1, LCDR2 and/or LCDR3) of BCMA-1, BCMA-2, BCMA-3, BCMA-4, BCMA-5, BCMA-6, BCMA-7, BCMA-8, BCMA-9, BCMA-10, BCMA-11, BCMA-12, BCMA-13, BCMA-14, BCMA-15, 149362, 149363, 149364, 149365, 149366, 149367, 149368, 149369, BCMA_EBB-C1978-A4, BCMA_EBB-C1978-G1, BCMA_EBB-C1979-C1, BCMA_EBB-C1978-C7, BCMA_EBB-C1978-D10, BCMA_EBB-C1979-C12, BCMA_EBB-C1980-G4, BCMA_EBB-C1980-D2, BCMA_EBB-C1978-A10, BCMA_EBB-C1978-D4, BCMA_EBB-C1980-A2, BCMA_EBB-C1981-C3, BCMA_EBB-C1978-G4, A7D12.2, C11D5.3, C12A3.2, or C13F12.1, provided in Table 23; or a sequence substantially identical (e.g., 95-99% identical, or up to 20, 15, 10, 8, 6, 5, 4, 3, 2, or 1 amino acid changes, e.g., substitutions (e.g., conservative substitutions)) to any of the aforesaid sequences.

[0436] In certain embodiments, the BCMA CAR molecule, or the anti-BCMA antigen binding domain, includes one, two or three CDRs from the heavy chain variable region (e.g., HCDR1, HCDR2 and/or HCDR3), provided in Table 24; and/or one, two or three CDRs from the light chain variable region (e.g., LCDR1, LCDR2 and/or LCDR3) of BCMA-1, BCMA-2, BCMA-3, BCMA-4, BCMA-5, BCMA-6, BCMA-7, BCMA-8, BCMA-9, BCMA-10, BCMA-11, BCMA-12, BCMA-13, BCMA-14, BCMA-15, 149362, 149363, 149364, 149365, 149366, 149367, 149368, 149369, BCMA_EBB-C1978-A4, BCMA_EBB-C1978-G1, BCMA_EBB-C1979-C1, BCMA_EBB-C1978-C7, BCMA_EBB-C1978-D10, BCMA_EBB-C1979-C12, BCMA_EBB-C1980-G4, BCMA_EBB-C1980-D2, BCMA_EBB-C1978-A10, BCMA_EBB-C1978-D4, BCMA_EBB-C1980-A2, BCMA_EBB-C1981-C3, BCMA_EBB-C1978-G4, A7D12.2, C11D5.3, C12A3.2, or C13F12.1, provided in Table 25; or a sequence substantially identical (e.g., 95-99% identical, or up to 20, 15, 10, 8, 6, 5, 4, 3, 2, or 1 amino acid changes, e.g., substitutions (e.g., conservative substitutions)) to any of the aforesaid sequences.

[0437] The sequences of human CDR sequences of the scFv domains are shown in Tables 20, 22, and 24 for the heavy chain variable domains and in Tables 21, 23, and 25 for the light chain variable domains. “ID” stands for the respective SEQ ID NO for each CDR.

TABLE 20
Heavy Chain Variable Domain CDRs according to the Kabat
numbering scheme (Kabat et al. (1991), “Sequences
of Proteins of Immunological Interest,” 5th Ed. Public
Health Service, National Institutes of Health, Bethesda, MD)

| Candidate | HCDR1 | ID | HCDR2 | ID | HCDR3 | ID |
|---|---|---|---|---|---|---|
| 139109 | NHGMS | 394 | GIVYSGSTYYAAS | 434 | HGGESDV | 474 |
| | | | VKG | | | |
| 139103 | NYAMS | 384 | GISRSGENTYYAD | 424 | SPAHYYGGMDV | 464 |
| | | | SVKG | | | |
| 139105 | DYAMH | 385 | GISWNSGSIGYAD | 425 | HSFLAY | 465 |
| | | | SVKG | | | |
| 139111 | NHGMS | 386 | GIVYSGSTYYAAS | 426 | HGGESDV | 466 |
| | | | VKG | | | |
| 139100 | NFGIN | 387 | WINPKNNNTNYA | 427 | GPYYYQSYMDV | 467 |
| | | | QKFQG | | | |
| 139101 | SDAMT | 388 | VISGSGGTTYYAD | 428 | LDSSGYYYARGPRY | 468 |
| | | | SVKG | | | |
| 139102 | NYGIT | 389 | WISAYNGNTNYA | 429 | GPYYYYMDV | 469 |
| | | | QKFQG | | | |
| 139104 | NHGMS | 390 | GIVYSGSTYYAAS | 430 | HGGESDV | 470 |
| | | | VKG | | | |
| 139106 | NHGMS | 391 | GIVYSGSTYYAAS | 431 | HGGESDV | 471 |
| | | | VKG | | | |
| 139107 | NHGMS | 392 | GIVYSGSTYYAAS | 432 | HGGESDV | 472 |
| | | | VKG | | | |
| 139108 | DYYMS | 393 | YISSSGSTIYYADS | 433 | ESGDGMDV | 473 |
| | | | VKG | | | |
| 139110 | DYYMS | 395 | YISSSGNTIYYADS | 435 | STMVREDY | 475 |
| | | | VKG | | | |
| 139112 | NHGMS | 396 | GIVYSGSTYYAAS | 436 | HGGESDV | 476 |
| | | | VKG | | | |
| 139113 | NHGMS | 397 | GIVYSGSTYYAAS | 437 | HGGESDV | 477 |
| | | | VKG | | | |
| 139114 | NHGMS | 398 | GIVYSGSTYYAAS | 438 | HGGESDV | 478 |
| | | | VKG | | | |
| 149362 | SSYYYWG | 399 | SIYYSGSAYYNPS | 439 | HWQEWPDAFDI | 479 |
| | | | LKS | | | |
| 149363 | TSGMCVS | 400 | RIDWDEDKFYSTS | 440 | SGAGGTSATAFDI | 480 |
| | | | LKT | | | |
| 149364 | SYSMN | 401 | SISSSSSYIYYADS | 441 | TIAAVYAFDI | 481 |
| | | | VKG | | | |
| 149365 | DYYMS | 402 | YISSSGSTIYYADS | 442 | DLRGAFDI | 482 |
| | | | VKG | | | |
| 149366 | SHYIH | 403 | MINPSGGVTAYSQ | 443 | EGSGSGWYFDF | 483 |
| | | | TLQG | | | |
| 149367 | SGGYYWS | 404 | YIYYSGSTYYNPS | 444 | AGIAARLRGAFDI | 484 |
| | | | LKS | | | |
| 149368 | SYAIS | 405 | GIIPIFGTANYAQK | 445 | RGGYQLLRWDVG | 485 |
| | | | FQG | | LLRSAFDI | |
| 149369 | SNSAAWN | 406 | RTYYRSKWYSFY | 446 | SSPEGLFLYWFDP | 486 |
| | | | AISLKS | | | |
| BCMA_EBB- | SYAMS | 407 | AISGSGGSTYYAD | 447 | VEGSGSLDY | 487 |
| C1978- | | | SVKG | | | |
| A4 | | | | | | |
| BCMA_EBB- | RYPMS | 408 | GISDSGVSTYYAD | 448 | RAGSEASDI | 488 |
| C1978- | | | SAKG | | | |
| G1 | | | | | | |
| BCMA_EBB- | SYAMS | 409 | AISGSGGSTYYAD | 449 | ATYKRELRYYYG | 489 |
| C1979-C1 | | | SVKG | | MDV | |
| BCMA_EBB- | SYAMS | 410 | AISGSGGSTYYAD | 450 | ATYKRELRYYYG | 490 |
| C1978-C7 | | | SVKG | | MDV | |
| BCMA_EBB- | DYAMH | 411 | GISWNSGSIGYAD | 451 | VGKAVPDV | 491 |
| C1978- | | | SVKG | | | |
| D10 | | | | | | |
| BCMA_EBB- | DYAMH | 412 | SINWKGNSLAYG | 452 | HQGVAYYNYAMDV | 492 |
| C1979- | | | DSVKG | | | |
| C12 | | | | | | |
| BCMA_EBB- | SYAMS | 413 | AISGSGGSTYYAD | 453 | VVRDGMDV | 493 |
| C1980- | | | SVKG | | | |
| G4 | | | | | | |
| BCMA_EBB- | SYAMS | 414 | AISGSGGSTYYAD | 454 | IPQTGTFDY | 494 |
| C1980- | | | SVKG | | | |
| D2 | | | | | | |
| BCMA_EBB- | SYAMS | 415 | AISGSGGSTYYAD | 455 | ANYKRELRYYYG | 495 |
| B-C1978- | | | SVKG | | MDV | |
| A10 | | | | | | |
| BCMA_EBB- | SYAMS | 416 | AISGSGGSTYYAD | 456 | ALVGATGAFDI | 496 |
| C1978- | | | SVKG | | | |
| D4 | | | | | | |
| BCMA_EBB- | SYAMS | 417 | AISGSGGSTYYAD | 457 | WFGEGFDP | 497 |
| C1980- | | | SVKG | | | |
| A2 | | | | | | |
| BCMA_EBB- | SYAMS | 418 | AISGSGGSTYYAD | 458 | VGYDSSGYYRDY | 498 |
| C1981-C3 | | | SVKG | | YGMDV | |
| BCMA_EBB- | SYAMS | 419 | AISGSGGSTYYAD | 459 | MGWSSGYLGAFDI | 499 |
| C1978- | | | SVKG | | | |
| G4 | | | | | | |
| A7D12.2 | NFGMN | 420 | WINTYTGESYFAD | 460 | GEIYYGYDGGFAY | 500 |
| | | | DFKG | | | |
| C11D5.3 | DYSIN | 421 | WINTETREPAYAY | 461 | DYSYAMDY | 501 |
| | | | DFRG | | | |
| C12A3.2 | HYSMN | 422 | RINTESGVPIYADD | 462 | DYLYSLDF | 502 |
| | | | FKG | | | |
| C13F12.1 | HYSMN | 423 | RINTETGEPLYAD | 463 | DYLYSCDY | 503 |
| | | | DFKG | | | |

TABLE 21
Light Chain Variable Domain CDRs according to the Kabat
numbering scheme (Kabat et al. (1991), “Sequences of
Proteins of Immunological Interest,” 5th Ed. Public
Health Service, National Institutes of Health, Bethesda, MD)

| Candidate | LCDR1 | ID | LCDR2 | ID | LCDR3 | ID |
|---|---|---|---|---|---|---|
| 139109 | RASQSISSYLN | 514 | AASSLQS | 554 | QQSYSTPYT | 594 |
| 139103 | RASQSISSSFLA | 504 | GASRRAT | 544 | QQYHSSPSWT | 584 |
| 139105 | RSSQSLLHSNGYNY | 505 | LGSNRAS | 545 | MQALQTPYT | 585 |
| | LD | | | | | |
| 139111 | KSSQSLLRNDGKTP | 506 | EVSNRFS | 546 | MQNIQFPS | 586 |
| | LY | | | | | |
| 139100 | RSSQSLLHSNGYNY | 507 | LGSKRAS | 547 | MQALQTPYT | 587 |
| | LN | | | | | |
| 139101 | RASQSISSYLN | 508 | GASTLAS | 548 | QQSYKRAS | 588 |
| 139102 | RSSQSLLYSNGYNY | 509 | LGSNRAS | 549 | MQGRQFPYS | 589 |
| | VD | | | | | |
| 139104 | RASQSVSSNLA | 510 | GASTRAS | 550 | QQYGSSLT | 590 |
| 139106 | RASQSVSSKLA | 511 | GASIRAT | 551 | QQYGSSSWT | 591 |
| 139107 | RASQSVGSTNLA | 512 | DASNRAT | 552 | QQYGSSPPWT | 592 |
| 139108 | RASQSISSYLN | 513 | AASSLQS | 553 | QQSYTLA | 593 |
| 139110 | KSSESLVHNSGKTY | 515 | EVSNRDS | 555 | MQGTHWPGT | 595 |
| | LN | | | | | |
| 139112 | QASEDINKFLN | 516 | DASTLQT | 556 | QQYESLPLT | 596 |
| 139113 | RASQSVGSNLA | 517 | GASTRAT | 557 | QQYNDWLPVT | 597 |
| 139114 | RASQSIGSSSLA | 518 | GASSRAS | 558 | QQYAGSPPFT | 598 |
| 149362 | KASQDIDDAMN | 519 | SATSPVP | 559 | LQHDNFPLT | 599 |
| 149363 | RASQDIYNNLA | 520 | AANKSQS | 560 | QHYYRFPYS | 600 |
| 149364 | RSSQSLLHSNGYNY | 521 | LGSNRAS | 561 | MQALQTPYT | 601 |
| | LD | | | | | |
| 149365 | GGNNIGTKSVH | 522 | DDSVRPS | 562 | QVWDSDSEH | 602 |
| | | | | | VV | |
| 149366 | SGDGLSKKYVS | 523 | RDKERPS | 563 | QAWDDTTVV | 603 |
| 149367 | RASQGIRNWLA | 524 | AASNLQS | 564 | QKYNSAPFT | 604 |
| 149368 | GGNNIGSKSVH | 525 | GKNNRPS | 565 | SSRDSSGDHL | 605 |
| | | | | | RV | |
| 149369 | QGDSLGNYYAT | 526 | GTNNRPS | 566 | NSRDSSGHHLL | 606 |
| BCMA_EBB- | RASQSVSSAYLA | 527 | GASTRAT | 567 | QHYGSSFNGS | 607 |
| C1978-A4 | | | | | SLFT | |
| BCMA_EBB- | RASQSVSNSLA | 528 | DASSRAT | 568 | QQFGTSSGLT | 608 |
| C1978-G1 | | | | | | |
| BCMA_EBB- | RASQSVSSSFLA | 529 | GASSRAT | 569 | QQYHSSPSWT | 609 |
| C1979-C1 | | | | | | |
| BCMA_EBB- | RASQSVSTTFLA | 530 | GSSNRAT | 570 | QQYHSSPSWT | 610 |
| C1978-C7 | | | | | | |
| BCMA_EBB- | RASQSISSYLN | 531 | AASSLQS | 571 | QQSYSTPYS | 611 |
| C1978-D10 | | | | | | |
| BCMA_EBB- | RATQSIGSSFLA | 532 | GASQRAT | 572 | QHYESSPSWT | 612 |
| C1979-C12 | | | | | | |
| BCMA_EBB- | RASQSVSSSYLA | 533 | GASSRAT | 573 | QQYGSPPRFT | 613 |
| C1980-G4 | | | | | | |
| BCMA_EBB- | RASQSVSSSYLA | 534 | GASSRAT | 574 | QHYGSSPSWT | 614 |
| C1980-D2 | | | | | | |
| BCMA_EBB- | RASQRVASNYLA | 535 | GASSRAT | 575 | QHYDSSPSWT | 615 |
| C1978-A10 | | | | | | |
| BCMA_EBB- | RASQSLSSNFLA | 536 | GASNWAT | 576 | QYYGTSPMYT | 616 |
| C1978-D4 | | | | | | |
| BCMA_EBB- | RSSQSLLHSNGYNY | 537 | LGSNRAS | 577 | MQALQTPLT | 617 |
| C1980-A2 | LD | | | | | |
| BCMA_EBB- | RASQSVSSSYLA | 538 | GTSSRAT | 578 | QHYGNSPPKFT | 618 |
| C1981-C3 | | | | | | |
| BCMA_EBB- | RASQSVASSFLA | 539 | GASGRAT | 579 | QHYGGSPRLT | 619 |
| C1978-G4 | | | | | | |
| A7D12.2 | RASQDVNTAVS | 540 | SASYRYT | 580 | QQHYSTPWT | 620 |
| C11D5.3 | RASESVSVIGAHLIH | 541 | LASNLET | 581 | LQSRIFPRT | 621 |
| C12A3.2 | RASESVTILGSHLIY | 542 | LASNVQT | 582 | LQSRTIPRT | 622 |
| C13F12.1 | RASESVTILGSHLIY | 543 | LASNVQT | 583 | LQSRTIPRT | 623 |

TABLE 22
Heavy Chain Variable Domain CDRs according to the
Chothia numbering scheme (A1- Lazikani et al., (1997)
JMB 273, 927-948)

| Candidate | HCDR1 | ID | HCDR2 | ID | HCDR3 | ID |
|---|---|---|---|---|---|---|
| 139109 | GFALSNH | 634 | VYSGS | 674 | HGGESDV | 714 |
| 139103 | GFTFSNY | 624 | SRSGEN | 664 | SPAHYYGGMDV | 704 |
| 139105 | GFTFDDY | 625 | SWNSGS | 665 | HSFLAY | 705 |
| 139111 | GFALSNH | 626 | VYSGS | 666 | HGGESDV | 706 |
| 139100 | GYIFDNF | 627 | NPKNNN | 667 | GPYYYQSYMDV | 707 |
| 139101 | GFTFSSD | 628 | SGSGGT | 668 | LDSSGYYYARGPRY | 708 |
| 139102 | GYTFSNY | 629 | SAYNGN | 669 | GPYYYYMDV | 709 |
| 139104 | GFALSNH | 630 | VYSGS | 670 | HGGESDV | 710 |
| 139106 | GFALSNH | 631 | VYSGS | 671 | HGGESDV | 711 |
| 139107 | GFALSNH | 632 | VYSGS | 672 | HGGESDV | 712 |
| 139108 | GFTFSDY | 633 | SSSGST | 673 | ESGDGMDV | 713 |
| 139110 | GFTFSDY | 635 | SSSGNT | 675 | STMVREDY | 715 |
| 139112 | GFALSNH | 636 | VYSGS | 676 | HGGESDV | 716 |
| 139113 | GFALSNH | 637 | VYSGS | 677 | HGGESDV | 717 |
| 139114 | GFALSNH | 638 | VYSGS | 678 | HGGESDV | 718 |
| 149362 | GGSISSSYY | 639 | YYSGS | 679 | HWQEWPDAFDI | 719 |
| 149363 | GFSLRTSGM | 640 | DWDED | 680 | SGAGGTSATAFDI | 720 |
| 149364 | GFTFSSY | 641 | SSSSSY | 681 | TIAAVYAFDI | 721 |
| 149365 | GFTFSDY | 642 | SSSGST | 682 | DLRGAFDI | 722 |
| 149366 | GYTVTSH | 643 | NPSGGV | 683 | EGSGSGWYFDF | 723 |
| 149367 | GGSISSGGY | 644 | YYSGS | 684 | AGIAARLRGAFDI | 724 |
| 149368 | GGTFSSY | 645 | IPIFGT | 685 | RGGYQLLRWDVGL | 725 |
| | | | | | LRSAFDI | |
| 149369 | GDSVSSNSA | 646 | YYRSKWY | 686 | SSPEGLFLYWFDP | 726 |
| BCMA_EBB- | GFTFSSY | 647 | SGSGGS | 687 | VEGSGSLDY | 727 |
| C1978-A4 | | | | | | |
| BCMA_EBB- | GITFSRY | 648 | SDSGVS | 688 | RAGSEASDI | 728 |
| C1978-G1 | | | | | | |
| BCMA_EBB- | GFTFSSY | 649 | SGSGGS | 689 | ATYKRELRYYYGM | 729 |
| C1979-C1 | | | | | DV | |
| BCMA_EBB- | GFTFSSY | 650 | SGSGGS | 690 | ATYKRELRYYYGM | 730 |
| C1978-C7 | | | | | DV | |
| BCMA_EBB- | GFTFDDY | 651 | SWNSGS | 691 | VGKAVPDV | 731 |
| C1978-D10 | | | | | | |
| BCMA_EBB- | GFTFDDY | 652 | NWKGNS | 692 | HQGVAYYNYAMDV | 732 |
| C1979-C12 | | | | | | |
| BCMA_EBB- | GFTFSSY | 653 | SGSGGS | 693 | VVRDGMDV | 733 |
| C1980-G4 | | | | | | |
| BCMA_EBB- | GFTFSSY | 654 | SGSGGS | 694 | IPQTGTFDY | 734 |
| C1980-D2 | | | | | | |
| BCMA_EBB- | GFTFSSY | 655 | SGSGGS | 695 | ANYKRELRYYYG | 735 |
| C1978-A10 | | | | | MDV | |
| BCMA_EBB- | GFSFSSY | 656 | SGSGGS | 696 | ALVGATGAFDI | 736 |
| C1978-D4 | | | | | | |
| BCMA_EBB- | GFTFSSY | 657 | SGSGGS | 697 | WFGEGFDP | 737 |
| C1980-A2 | | | | | | |
| BCMA_EBB- | GFTFSSY | 658 | SGSGGS | 698 | VGYDSSGYYRDYY | 738 |
| C1981-C3 | | | | | GMDV | |
| BCMA_EBB- | GFTFSSY | 659 | SGSGGS | 699 | MGWSSGYLGAFDI | 739 |
| C1978-G4 | | | | | | |
| A7D12.2 | GYTFTNF | 660 | NTYTGE | 700 | GEIYYGYDGGFAY | 740 |
| C11D5.3 | GYTFTDY | 661 | NTETRE | 701 | DYSYAMDY | 741 |
| C12A3.2 | GYTFRHY | 662 | NTESGV | 702 | DYLYSLDF | 742 |
| C13F12.1 | GYTFTHY | 663 | NTETGE | 703 | DYLYSCDY | 743 |

TABLE 23
Light Chain Variable Domain CDRs according to the
Chothia numbering scheme (A1-Lazikani et al.,
(1997) JMB 273, 927-948)

| Candidate | LCDR1 | ID | LCDR2 | ID | LCDR3 | ID |
|---|---|---|---|---|---|---|
| 139109 | SQSISSY | 754 | AAS | 794 | SYSTPY | 834 |
| 139103 | SQSISSSF | 744 | GAS | 784 | YHSSPSW | 824 |
| 139105 | SQSLLHSNGYNY | 745 | LGS | 785 | ALQTPY | 825 |
| 139111 | SQSLLRNDGKTP | 746 | EVS | 786 | NIQFP | 826 |
| 139100 | SQSLLHSNGYNY | 747 | LGS | 787 | ALQTPY | 827 |
| 139101 | SQSISSY | 748 | GAS | 788 | SYKRA | 828 |
| 139102 | SQSLLYSNGYNY | 749 | LGS | 789 | GRQFPY | 829 |
| 139104 | SQSVSSN | 750 | GAS | 790 | YGSSL | 830 |
| 139106 | SQSVSSK | 751 | GAS | 791 | YGSSSW | 831 |
| 139107 | SQSVGSTN | 752 | DAS | 792 | YGSSPPW | 832 |
| 139108 | SQSISSY | 753 | AAS | 793 | SYTL | 833 |
| 139110 | SESLVHNSGKTY | 755 | EVS | 795 | GTHWPG | 835 |
| 139112 | SEDINKF | 756 | DAS | 796 | YESLPL | 836 |
| 139113 | SQSVGSN | 757 | GAS | 797 | YNDWLPV | 837 |
| 139114 | SQSIGSSS | 758 | GAS | 798 | YAGSPPF | 838 |
| 149362 | SQDIDDA | 759 | SAT | 799 | HDNFPL | 839 |
| 149363 | SQDIYNN | 760 | AAN | 800 | YYRFPY | 840 |
| 149364 | SQSLLHSNGYNY | 761 | LGS | 801 | ALQTPY | 841 |
| 149365 | NNIGTKS | 762 | DDS | 802 | WDSDSEHV | 842 |
| 149366 | DGLSKKY | 763 | RDK | 803 | WDDTTV | 843 |
| 149367 | SQGIRNW | 764 | AAS | 804 | YNSAPF | 844 |
| 149368 | NNIGSKS | 765 | GKN | 805 | RDSSGDHLR | 845 |
| 149369 | DSLGNYY | 766 | GTN | 806 | RDSSGHHL | 846 |
| BCMA_EBB- | SQSVSSAY | 767 | GAS | 807 | YGSSFNGSSLF | 847 |
| C1978-A4 | | | | | | |
| BCMA_EBB- | SQSVSNS | 768 | DAS | 808 | FGTSSGL | 848 |
| C1978-G1 | | | | | | |
| BCMA_EBB- | SQSVSSSF | 769 | GAS | 809 | YHSSPSW | 849 |
| C1979-C1 | | | | | | |
| BCMA_EBB- | SQSVSTTF | 770 | GSS | 810 | YHSSPSW | 850 |
| C1978-C7 | | | | | | |
| BCMA_EBB- | SQSISSY | 771 | AAS | 811 | SYSTPY | 851 |
| C1978-D10 | | | | | | |
| BCMA_EBB- | TQSIGSSF | 772 | GAS | 812 | YESSPSW | 852 |
| C1979-C12 | | | | | | |
| BCMA_EBB- | SQSVSSSY | 773 | GAS | 813 | YGSPPRF | 853 |
| C1980-G4 | | | | | | |
| BCMA_EBB- | SQSVSSSY | 774 | GAS | 814 | YGSSPSW | 854 |
| C1980-D2 | | | | | | |
| BCMA_EBB- | SQRVASNY | 775 | GAS | 815 | YDSSPSW | 855 |
| C1978-A10 | | | | | | |
| BCMA_EBB- | SQSLSSNF | 776 | GAS | 816 | YGTSPMY | 856 |
| C1978-D4 | | | | | | |
| BCMA_EBB- | SQSLLHSNGYNY | 777 | LGS | 817 | ALQTPL | 857 |
| C1980-A2 | | | | | | |
| BCMA_EBB- | SQSVSSSY | 778 | GTS | 818 | YGNSPPKF | 858 |
| C1981-C3 | | | | | | |
| BCMA_EBB- | SQSVASSF | 779 | GAS | 819 | YGGSPRL | 859 |
| C1978-G4 | | | | | | |
| A7D12.2 | SQDVNTA | 780 | SAS | 820 | HYSTPW | 860 |
| C11D5.3 | SESVSVIGAHL | 781 | LAS | 821 | SRIFPR | 861 |
| C12A3.2 | SESVTILGSHL | 782 | LAS | 822 | SRTIPR | 862 |
| C13F12.1 | SESVTILGSHL | 783 | LAS | 823 | SRTIPR | 863 |

TABLE 24
Heavy Chain Variable Domain CDRs according to a combination
of the Kabat numbering scheme (Kabat et al. (1991),
“Sequences of Proteins of Immunological Interest,” 5th
Ed. Public Health Service, National Institutes of Health,
Bethesda, MD) and the Chothia numbering scheme
(A1-Lazikani et al., (1997) JMB 273, 927-948).

| Candidate | HCDR1 | ID | HCDR2 | ID | HCDR3 | ID |
|---|---|---|---|---|---|---|
| 139109 | GFALSNHGMS | 874 | GIVYSGSTYYA | 914 | HGGESDV | 954 |
| | | | ASVKG | | | |
| 139103 | GFTFSNYAMS | 864 | GISRSGENTYYA | 904 | SPAHYYGGMDV | 944 |
| | | | DSVKG | | | |
| 139105 | GFTFDDYAMH | 865 | GISWNSGSIGYA | 905 | HSFLAY | 945 |
| | | | DSVKG | | | |
| 139111 | GFALSNHGMS | 866 | GIVYSGSTYYA | 906 | HGGESDV | 946 |
| | | | ASVKG | | | |
| 139100 | GYIFDNFGIN | 867 | WINPKNNNTNY | 907 | GPYYYQSYMDV | 947 |
| | | | AQKFQG | | | |
| 139101 | GFTFSSDAMT | 868 | VISGSGGTTYY | 908 | LDSSGYYYARG | 948 |
| | | | ADSVKG | | PRY | |
| 139102 | GYTFSNYGIT | 869 | WISAYNGNTNY | 909 | GPYYYYMDV | 949 |
| | | | AQKFQG | | | |
| 139104 | GFALSNHGMS | 870 | GIVYSGSTYYA | 910 | HGGESDV | 950 |
| | | | ASVKG | | | |
| 139106 | GFALSNHGMS | 871 | GIVYSGSTYYA | 911 | HGGESDV | 951 |
| | | | ASVKG | | | |
| 139107 | GFALSNHGMS | 872 | GIVYSGSTYYA | 912 | HGGESDV | 952 |
| | | | ASVKG | | | |
| 139108 | GFTFSDYYMS | 873 | YISSSGSTIYYA | 913 | ESGDGMDV | 953 |
| | | | DSVKG | | | |
| 139110 | GFTFSDYYMS | 875 | YISSSGNTIYYA | 915 | STMVREDY | 955 |
| | | | DSVKG | | | |
| 139112 | GFALSNHGMS | 876 | GIVYSGSTYYA | 916 | HGGESDV | 956 |
| | | | ASVKG | | | |
| 139113 | GFALSNHGMS | 877 | GIVYSGSTYYA | 917 | HGGESDV | 957 |
| | | | ASVKG | | | |
| 139114 | GFALSNHGMS | 878 | GIVYSGSTYYA | 918 | HGGESDV | 958 |
| | | | ASVKG | | | |
| 149362 | GGSISSSYYY | 879 | SIYYSGSAYYNP | 919 | HWQEWPDAFDI | 959 |
| | WG | | SLKS | | | |
| 149363 | GFSLRTSGM | 880 | RIDWDEDKFYS | 920 | SGAGGTSATAF | 960 |
| | CVS | | TSLKT | | DI | |
| 149364 | GFTFSSYSMN | 881 | SISSSSSYIYYAD | 921 | TIAAVYAFDI | 961 |
| | | | SVKG | | | |
| 149365 | GFTFSDYYMS | 882 | YISSSGSTIYYA | 922 | DLRGAFDI | 962 |
| | | | DSVKG | | | |
| 149366 | GYTVTSHYIH | 883 | MINPSGGVTAY | 923 | EGSGSGWYFDF | 963 |
| | | | SQTLQG | | | |
| 149367 | GGSISSGGYY | 884 | YIYYSGSTYYNP | 924 | AGIAARLRGAFDI | 964 |
| | WS | | SLKS | | | |
| 149368 | GGTFSSYAIS | 885 | GIIPIFGTANYA | 925 | RGGYQLLRWDV | 965 |
| | | | QKFQG | | GLLRSAFDI | |
| 149369 | GDSVSSNSA | 886 | RTYYRSKWYSF | 926 | SSPEGLFLYWFDP | 966 |
| | AWN | | YAISLKS | | | |
| BCMA_EBB- | GFTFSSYAMS | 887 | AISGSGGSTYYA | 927 | VEGSGSLDY | 967 |
| C1978- | | | DSVKG | | | |
| A4 | | | | | | |
| BCMA_EBB- | GITFSRYPMS | 888 | GISDSGVSTYYA | 928 | RAGSEASDI | 968 |
| C1978- | | | DSAKG | | | |
| G1 | | | | | | |
| BCMA_EBB- | GFTFSSYAMS | 889 | AISGSGGSTYYA | 929 | ATYKRELRYYY | 969 |
| C1979- | | | DSVKG | | GMDV | |
| C1 | | | | | | |
| BCMA_EBB- | GFTFSSYAMS | 890 | AISGSGGSTYYA | 930 | ATYKRELRYYY | 970 |
| C1978- | | | DSVKG | | GMDV | |
| C7 | | | | | | |
| BCMA_EBB- | GFTFDDYAMH | 891 | GISWNSGSIGYA | 931 | VGKAVPDV | 971 |
| C1978- | | | DSVKG | | | |
| D10 | | | | | | |
| BCMA_EBB- | GFTFDDYAMH | 892 | SINWKGNSLAY | 932 | HQGVAYYNYA | 972 |
| B-C1979- | | | GDSVKG | | MDV | |
| C12 | | | | | | |
| BCMA_EBB- | GFTFSSYAMS | 893 | AISGSGGSTYYA | 933 | VVRDGMDV | 973 |
| B-C1980- | | | DSVKG | | | |
| G4 | | | | | | |
| BCMA_EBB- | GFTFSSYAMS | 894 | AISGSGGSTYYA | 934 | IPQTGTFDY | 974 |
| B-C1980- | | | DSVKG | | | |
| D2 | | | | | | |
| BCMA_EBB- | GFTFSSYAMS | 895 | AISGSGGSTYYA | 935 | ANYKRELRYYY | 975 |
| B-C1978- | | | DSVKG | | GMDV | |
| A10 | | | | | | |
| BCMA_EBB- | GFSFSSYAMS | 896 | AISGSGGSTYYA | 936 | ALVGATGAFDI | 976 |
| C1978- | | | DSVKG | | | |
| D4 | | | | | | |
| BCMA_EBB- | GFTFSSYAMS | 897 | AISGSGGSTYYA | 937 | WFGEGFDP | 977 |
| C1980- | | | DSVKG | | | |
| A2 | | | | | | |
| BCMA_EBB- | GFTFSSYAMS | 898 | AISGSGGSTYYA | 938 | VGYDSSGYYRD | 978 |
| C1981- | | | DSVKG | | YYGMDV | |
| C3 | | | | | | |
| BCMA_EBB- | GFTFSSYAMS | 899 | AISGSGGSTYYA | 939 | MGWSSGYLGAF | 979 |
| C1978- | | | DSVKG | | DI | |
| G4 | | | | | | |
| A7D12.2 | GYTFTNFGMN | 900 | WINTYTGESYF | 940 | GEIYYGYDGGF | 980 |
| | | | ADDFKG | | AY | |
| C11D5.3 | GYTFTDYSIN | 901 | WINTETREPAY | 941 | DYSYAMDY | 981 |
| | | | AYDFRG | | | |
| C12A3.2 | GYTFRHYSMN | 902 | RINTESGVPIYA | 942 | DYLYSLDF | 982 |
| | | | DDFKG | | | |
| C13F12.1 | GYTFTHYSMN | 903 | RINTETGEPLYA | 943 | DYLYSCDY | 983 |
| | | | DDFKG | | | |

TABLE 25
Light Chain Variable Domain CDRs according to a combination of
the Kabat numbering scheme (Kabat et al. (1991), “Sequences
of Proteins of Immunological Interest,” 5th Ed. Public Health
Service, National Institutes of Health, Bethesda, MD) and the
Chothia numbering scheme (A1-Lazikani et al., (1997)
JMB 273, 927-948).

| Candidate | LCDR1 | ID | LCDR2 | ID | LCDR3 | ID |
|---|---|---|---|---|---|---|
| 139109 | RASQSISSYLN | 994 | AASSLQS | 1034 | QQSYSTPYT | 1074 |
| 139103 | RASQSISSSFLA | 984 | GASRRAT | 1024 | QQYHSSPSWT | 1064 |
| 139105 | RSSQSLLHSNGYNYLD | 985 | LGSNRAS | 1025 | MQALQTPYT | 1065 |
| 139111 | KSSQSLLRNDGKTPLY | 986 | EVSNRFS | 1026 | MQNIQFPS | 1066 |
| 139100 | RSSQSLLHSNGYNYLN | 987 | LGSKRAS | 1027 | MQALQTPYT | 1067 |
| 139101 | RASQSISSYLN | 988 | GASTLAS | 1028 | QQSYKRAS | 1068 |
| 139102 | RSSQSLLYSNGYNYVD | 989 | LGSNRAS | 1029 | MQGRQFPYS | 1069 |
| 139104 | RASQSVSSNLA | 990 | GASTRAS | 1030 | QQYGSSLT | 1070 |
| 139106 | RASQSVSSKLA | 991 | GASIRAT | 1031 | QQYGSSSWT | 1071 |
| 139107 | RASQSVGSTNLA | 992 | DASNRAT | 1032 | QQYGSSPPWT | 1072 |
| 139108 | RASQSISSYLN | 993 | AASSLQS | 1033 | QQSYTLA | 1073 |
| 139110 | KSSESLVHNSGKTYLN | 995 | EVSNRDS | 1035 | MQGTHWPGT | 1075 |
| 139112 | QASEDINKFLN | 996 | DASTLQT | 1036 | QQYESLPLT | 1076 |
| 139113 | RASQSVGSNLA | 997 | GASTRAT | 1037 | QQYNDWLP | 1077 |
| | | | | | VT | |
| 139114 | RASQSIGSSSLA | 998 | GASSRAS | 1038 | QQYAGSPPFT | 1078 |
| 149362 | KASQDIDDAMN | 999 | SATSPVP | 1039 | LQHDNFPLT | 1079 |
| 149363 | RASQDIYNNLA | 1000 | AANKSQS | 1040 | QHYYRFPYS | 1080 |
| 149364 | RSSQSLLHSNGYNYLD | 1001 | LGSNRAS | 1041 | MQALQTPYT | 1081 |
| 149365 | GGNNIGTKSVH | 1002 | DDSVRPS | 1042 | QVWDSDSEH | 1082 |
| | | | | | VV | |
| 149366 | SGDGLSKKYVS | 1003 | RDKERPS | 1043 | QAWDDTTVV | 1083 |
| 149367 | RASQGIRNWLA | 1004 | AASNLQS | 1044 | QKYNSAPFT | 1084 |
| 149368 | GGNNIGSKSVH | 1005 | GKNNRPS | 1045 | SSRDSSGDH | 1085 |
| | | | | | LRV | |
| 149369 | QGDSLGNYYAT | 1006 | GTNNRPS | 1046 | NSRDSSGHH | 1086 |
| | | | | | LL | |
| BCMA_EBB- | RASQSVSSAYLA | 1007 | GASTRAT | 1047 | QHYGSSFNG | 1087 |
| C1978-A4 | | | | | SSLFT | |
| BCMA_EBB- | RASQSVSNSLA | 1008 | DASSRAT | 1048 | QQFGTSSGLTT | 1088 |
| C1978-G1 | | | | | | |
| BCMA_EBB- | RASQSVSSSFLA | 1009 | GASSRAT | 1049 | QQYHSSPSWT | 1089 |
| C1979-C1 | | | | | | |
| BCMA_EBB- | RASQSVSTTFLA | 1010 | GSSNRAT | 1050 | QQYHSSPSWT | 1090 |
| C1978-C7 | | | | | | |
| BCMA_EBB- | RASQSISSYLN | 1011 | AASSLQS | 1051 | QQSYSTPYS | 1091 |
| C1978- | | | | | | |
| D10 | | | | | | |
| BCMA_EBB- | RATQSIGSSFLA | 1012 | GASQRAT | 1052 | QHYESSPSWT | 1092 |
| C1979- | | | | | | |
| C12 | | | | | | |
| BCMA_EBB- | RASQSVSSSYLA | 1013 | GASSRAT | 1053 | QQYGSPPRFT | 1093 |
| C1980-G4 | | | | | | |
| BCMA_EBB- | RASQSVSSSYLA | 1014 | GASSRAT | 1054 | QHYGSSPSWT | 1094 |
| C1980-D2 | | | | | | |
| BCMA_EBB- | RASQRVASNYLA | 1015 | GASSRAT | 1055 | QHYDSSPSWT | 1095 |
| C1978- | | | | | | |
| A10 | | | | | | |
| BCMA_EBB- | RASQSLSSNFLA | 1016 | GASNWAT | 1056 | QYYGTSPMYT | 1096 |
| C1978-D4 | | | | | | |
| BCMA_EBB- | RSSQSLLHSNGYNYLD | 1017 | LGSNRAS | 1057 | MQALQTPLT | 1097 |
| C1980-A2 | | | | | | |
| BCMA_EBB- | RASQSVSSSYLA | 1018 | GTSSRAT | 1058 | QHYGNSPPK | 1098 |
| C1981-C3 | | | | | FT | |
| BCMA_EBB- | RASQSVASSFLA | 1019 | GASGRAT | 1059 | QHYGGSPRLT | 1099 |
| B-C1978-G4 | | | | | | |
| A7D12.2 | RASQDVNTAVS | 1020 | SASYRYT | 1060 | QQHYSTPWT | 1100 |
| C11D5.3 | RASESVSVIGAHLIH | 1021 | LASNLET | 1061 | LQSRIFPRT | 1101 |
| C12A3.2 | RASESVTILGSHLIY | 1022 | LASNVQT | 1062 | LQSRTIPRT | 1102 |
| C13F12.1 | RASESVTILGSHLIY | 1023 | LASNVQT | 1063 | LQSRTIPRT | 1103 |

[0438] In certain embodiments, the CAR molecule described herein (e.g., the CAR nucleic acid or the CAR polypeptide) or a BCMA binding domain includes:

[0439] (1) one, two, or three light chain (LC) CDRs chosen from one of the following:

[0440] (i) a LC CDR1 of SEQ ID NO: 504, LC CDR2 of SEQ ID NO: 544 and LC CDR3 of SEQ ID NO: 584 of BCMA-4 CAR (139103);

[0441] (ii) a LC CDR1 of SEQ ID NO: 514, LC CDR2 of SEQ ID NO: 554 and LC CDR3 of SEQ ID NO: 594 of BCMA-10 CAR (139109);

[0442] (iii) a LC CDR1 of SEQ ID NO: 516, LC CDR2 of SEQ ID NO: 556 and LC CDR3 of SEQ ID NO: 596 of BCMA-13 CAR (139112); or

[0443] (iv) a LC CDR1 of SEQ ID NO: 518, LC CDR2 of SEQ ID NO: 558 and LC CDR3 of SEQ ID NO: 598 of BCMA-15 CAR (139114), and/or

[0444] (2) one, two, or three heavy chain (HC) CDRs from one of the following:

[0445] (i) a HC CDR1 of SEQ ID NO: 384, HC CDR2 of SEQ ID NO: 424 and HC CDR3 of SEQ ID NO: 464 of BCMA-4 CAR (139103);

[0446] (ii) a HC CDR1 of SEQ ID NO: 394, HC CDR2 of SEQ ID NO: 434 and HC CDR3 of SEQ ID NO: 474 of BCMA-10 CAR (139109);

[0447] (iii) a HC CDR1 of SEQ ID NO: 396, HC CDR2 of SEQ ID NO: 436 and HC CDR3 of SEQ ID NO: 476 of BCMA-13 CAR (139112); or

[0448] (iv) a HC CDR1 of SEQ ID NO: 398, HC CDR2 of SEQ ID NO: 438 and HC CDR3 of SEQ ID NO: 478 of BCMA-15 (139114).

[0449] In certain embodiments, the CAR molecule described herein (e.g., the CAR nucleic acid or the CAR polypeptide) includes:

[0450] (1) one, two, or three light chain (LC) CDRs chosen from one of the following:

[0451] (i) a LC CDR1 of SEQ ID NO: 744, LC CDR2 of SEQ ID NO: 784 and LC CDR3 of SEQ ID NO: 824 of BCMA-4 CAR (139103);

[0452] (ii) a LC CDR1 of SEQ ID NO: 754, LC CDR2 of SEQ ID NO: 794 and LC CDR3 of SEQ ID NO: 834 of BCMA-10 CAR (139109);

[0453] (iii) a LC CDR1 of SEQ ID NO: 756, LC CDR2 of SEQ ID NO: 796 and LC CDR3 of SEQ ID NO: 836 of BCMA-13 CAR (139112); or

[0454] (iv) a LC CDR1 of SEQ ID NO: 758, LC CDR2 of SEQ ID NO: 798 and LC CDR3 of SEQ ID NO: 838 of BCMA-15 CAR (139114); and/or

[0455] (2) one, two, or three heavy chain (HC) CDRs chosen from one of the following:

[0456] (i) a HC CDR1 of SEQ ID NO: 624, HC CDR2 of SEQ ID NO: 664 and HC CDR3 of SEQ ID NO: 704 of BCMA-4 CAR (139103);

[0457] (ii) a HC CDR1 of SEQ ID NO: 634, HC CDR2 of SEQ ID NO: 674 and HC CDR3 of SEQ ID NO: 714 of BCMA-10 CAR (139109);

[0458] (iii) a HC CDR1 of SEQ ID NO: 636, HC CDR2 of SEQ ID NO: 676 and HC CDR3 of SEQ ID NO: 716 of BCMA-13 CAR (139112); or

[0459] (iv) a HC CDR1 of SEQ ID NO: 638, HC CDR2 of SEQ ID NO: 678 and HC CDR3 of SEQ ID NO: 718 of BCMA-15 CAR (139114).

[0460] In certain embodiments, the CAR molecule described herein (e.g., the CAR nucleic acid or the CAR polypeptide) includes:

[0461] (1) one, two, or three light chain (LC) CDRs chosen from one of the following:

[0462] (i) a LC CDR1 of SEQ ID NO: 984 LC CDR2 of SEQ ID NO: 1024 and LC CDR3 of SEQ ID NO: 1064 of BCMA-4 CAR (139103);

[0463] (ii) a LC CDR1 of SEQ ID NO: 994, LC CDR2 of SEQ ID NO: 1034 and LC CDR3 of SEQ ID NO: 1074 of BCMA-10 CAR (139109);

[0464] (iii) a LC CDR1 of SEQ ID NO: 996, LC CDR2 of SEQ ID NO: 1036 and LC CDR3 of SEQ ID NO: 1076 of BCMA-13 CAR (139112); or

[0465] (iv) a LC CDR1 of SEQ ID NO: 998, LC CDR2 of SEQ ID NO: 1038 and LC CDR3 of SEQ ID NO: 1078 of BCMA-15 CAR (139114); and/or

[0466] (2) one, two, or three heavy chain (HC) CDRs chosen from one of the following:

[0467] (i) a HC CDR1 of SEQ ID NO: 864, HC CDR2 of SEQ ID NO: 904 and HC CDR3 of SEQ ID NO: 944 of BCMA-4 CAR (139103);

[0468] (ii) a HC CDR1 of SEQ ID NO: 874, HC CDR2 of SEQ ID NO: 914 and HC CDR3 of SEQ ID NO: 954 of BCMA-10 CAR (139109);

[0469] (iii) a HC CDR1 of SEQ ID NO: 876, HC CDR2 of SEQ ID NO: 916 and HC CDR3 of SEQ ID NO: 956 of BCMA-13 CAR (139112);

[0470] (iv) a HC CDR1 of SEQ ID NO: 878, HC CDR2 of SEQ ID NO: 918 and HC CDR3 of SEQ ID NO: 958 of BCMA-15 CAR (139114).

[0471] In embodiments, anti-BCMA CAR constructs, e.g., human or humanized anti-BCMA CAR constructs, are generated using a method described herein. Exemplary anti-BCMA scFvs include but are not limited to BCMA-1, BCMA-2, BCMA-3, BCMA-4, BCMA-5, BCMA-6, BCMA-7, BCMA-8, BCMA-9, BCMA-10, BCMA-11, BCMA-12, BCMA-13, BCMA-14, and BCMA-15. The sequences of human anti-BCMA scFv fragments (SEQ ID NOS: 39-52), are provided in Table 1 (and the name designations are provided in Table 2).

[0472] In embodiments, full BCMA CAR constructs (e.g., SEQ ID NOs: 99-113) are generated using scFv fragments, e.g., the human scFv fragments (e.g., SEQ ID NOs: 39-52), in combination with additional sequences, such as those shown below.

[0473] It is noted that the scFv fragments described herein, e.g., in Tables 1 and 16 or in SEQ ID NOS: 39-53, 129-149, 263-266, 271 or 273, without a leader sequence (e.g., without the amino acid sequence of SEQ ID NO: 1 or the nucleotide sequence of SEQ ID NO:12), are encompassed by the present invention. In other embodiments, scFv fragments described herein, e.g., in Tables 1 and 16 or in SEQ ID NOS: 39-53, 129-149, 263-266, 271 or 273 with a leader sequence (e.g., without the amino acid sequence of SEQ ID NO: 1 or the nucleotide sequence of SEQ ID NO:12), are also encompassed by the present invention.

leader (amino acid sequence)

(SEQ ID NO: 1)

MALPVTALLLPLALLLHAARP
leader (nucleic acid sequence)

(SEQ ID NO: 12)

ATGGCCCTGCCTGTGACAGCCCTGCTGCTGCCTCTGGCTCTGCTGCTGCA
TGCCGCTAGACCC
CD8 hinge (amino acid sequence)

(SEQ ID NO: 2)

TTTPAPRPPTPAPTIASQPLSLRPEACRPAAGGAVHTRGLDFACD
CD8 hinge (nucleic acid sequence)

(SEQ ID NO: 13)

ACCACGACGCCAGCGCCGCGACCACCAACACCGGCGCCCACCATCGCGTC
GCAGCCCCTGTCCCTGCGCCCAGAGGCGTGCCGGCCAGCGGCGGGGGGCG
CAGTGCACACGAGGGGGCTGGACTTCGCCTGTGAT
CD8 transmembrane (amino acid sequence)

(SEQ ID NO: 6)

IYIWAPLAGTCGVLLLSLVITLYC
CD8 transmembrane (nucleic acid sequence)

(SEQ ID NO: 17)

ATCTACATCTGGGCGCCCTTGGCCGGGACTTGTGGGGTCCTTCTCCTGTC
ACTGGTTATCACCCTTTACTGC
4-1BB Intracellular domain (amino acid sequence)

(SEQ ID NO: 7)

KRGRKKLLYIFKQPFMRPVQTTQEEDGCSCRFPEEEEGGCEL
4-1BB Intracellular domain (nucleic acid sequence)

(SEQ ID NO: 18)

AAACGGGGCAGAAAGAAACTCCTGTATATATTCAAACAACCATTTATGAG
ACCAGTACAAACTACTCAAGAGGAAGATGGCTGTAGCTGCCGATTTCCAG
AAGAAGAAGAAGGAGGATGTGAACTG
CD28 Intracellular domain (amino acid
sequence) (SEQ ID NO: 1104)

(SEQ ID NO: 1104)

RSKRSRLLHSDYMNMTPRRPGPTRKHYQPYAPPRDFAAYRS
CD28 Intracellular domain (nucleotide
sequence) (SEQ ID NO: 1105)

(SEQ ID NO: 1105)

AGGAGTAAGAGGAGCAGGCTCCTGCACAGTGACTACATGAACATGACTCC
CCGCCGCCCCGGGCCCACCCGCAAGCATTACCAGCCCTATGCCCCACCAC
GCGACTTCGCAGCCTATCGCTCC
ICOS Intracellular domain (amino acid
sequence) (SEQ ID NO: 1106)

(SEQ ID NO: 1106)

TKKKYSSSVHDPNGEYMFMRAVNTAKKSRLTDVTL
ICOS Intracellular domain (nucleotide
sequence) (SEQ ID NO: 1107)

(SEQ ID NO: 1107)

ACAAAAAAGAAGTATTCATCCAGTGTGCACGACCCTAACGGTGAATACAT
GTTCATGAGAGCAGTGAACACAGCCAAAAAATCCAGACTCACAGATGTGA
CCCTA
CD3 zeta domain (amino acid sequence)

(SEQ ID NO: 9)

RVKFSRSADAPAYKQGQNQLYNELNLGRREEYDVLDKRRGRDPEMGGKPR
RKNPQEGLYNELQKDKMAEAYSEIGMKGERRRGKGHDGLYQGLSTATKDT
YDALHMQALPPR
CD3 zeta (nucleic acid sequence)

(SEQ ID NO: 20)

AGAGTGAAGTTCAGCAGGAGCGCAGACGCCCCCGCGTACAAGCAGGGCCA
GAACCAGCTCTATAACGAGCTCAATCTAGGACGAAGAGAGGAGTACGATG
TTTTGGACAAGAGACGTGGCCGGGACCCTGAGATGGGGGGAAAGCCGAGA
AGGAAGAACCCTCAGGAAGGCCTGTACAATGAACTGCAGAAAGATAAGAT
GGCGGAGGCCTACAGTGAGATTGGGATGAAAGGCGAGCGCCGGAGGGGCA
AGGGGCACGATGGCCTTTACCAGGGTCTCAGTACAGCCACCAAGGACACC
TACGACGCCCTTCACATGCAGGCCCTGCCCCCTCGC
CD3 zeta domain (amino acid sequence; NCBI
Reference Sequence NM_000734.3)

(SEQ ID NO: 10)

RVKFSRSADAPAYQQGQNQLYNELNLGRREEYDVLDKRRGRDPEMGGKPR
RKNPQEGLYNELQKDKMAEAYSEIGMKGERRRGKGHDGLYQGLSTATKDT
YDALHMQALPPR
CD3 zeta (nucleic acid sequence; NCBI Reference
Sequence NM_000734.3);

(SEQ ID NO: 21)

AGAGTGAAGTTCAGCAGGAGCGCAGACGCCCCCGCGTACCAGCAGGGCCA
GAACCAGCTCTATAACGAGCTCAATCTAGGACGAAGAGAGGAGTACGATG
TTTTGGACAAGAGACGTGGCCGGGACCCTGAGATGGGGGGAAAGCCGAGA
AGGAAGAACCCTCAGGAAGGCCTGTACAATGAACTGCAGAAAGATAAGAT
GGCGGAGGCCTACAGTGAGATTGGGATGAAAGGCGAGCGCCGGAGGGGCA
AGGGGCACGATGGCCTTTACCAGGGTCTCAGTACAGCCACCAAGGACACC
TACGACGCCCTTCACATGCAGGCCCTGCCCCCTCGC
IgG4 Hinge (amino acid sequence)

(SEQ ID NO: 36)

ESKYGPPCPPCPAPEFLGGPSVFLFPPKPKDTLMISRTPEVTCVVVDVSQ
EDPEVQFNWYVDGVEVHNAKTKPREEQFNSTYRVVSVLTVLHQDWLNGKE
YKCKVSNKGLPSSIEKTISKAKGQPREPQVYTLPPSQEEMTKNQVSLTCL
VKGFYPSDIAVEWESNGQPENNYKTTPPVLDSDGSFFLYSRLTVDKSRWQ
EGNVFSCSVMHEALHNHYTQKSLSLSLGKM
IgG4 Hinge (nucleotide sequence)

(SEQ ID NO: 37)

GAGAGCAAGTACGGCCCTCCCTGCCCCCCTTGCCCTGCCCCCGAGTTCCT
GGGCGGACCCAGCGTGTTCCTGTTCCCCCCCAAGCCCAAGGACACCCTGA
TGATCAGCCGGACCCCCGAGGTGACCTGTGTGGTGGTGGACGTGTCCCAG
GAGGACCCCGAGGTCCAGTTCAACTGGTACGTGGACGGCGTGGAGGTGCA
CAACGCCAAGACCAAGCCCCGGGAGGAGCAGTTCAATAGCACCTACCGGG
TGGTGTCCGTGCTGACCGTGCTGCACCAGGACTGGCTGAACGGCAAGGAA
TACAAGTGTAAGGTGTCCAACAAGGGCCTGCCCAGCAGCATCGAGAAAAC
CATCAGCAAGGCCAAGGGCCAGCCTCGGGAGCCCCAGGTGTACACCCTGC
CCCCTAGCCAAGAGGAGATGACCAAGAACCAGGTGTCCCTGACCTGCCTG
GTGAAGGGCTTCTACCCCAGCGACATCGCCGTGGAGTGGGAGAGCAACGG
CCAGCCCGAGAACAACTACAAGACCACCCCCCCTGTGCTGGACAGCGACG
GCAGCTTCTTCCTGTACAGCCGGCTGACCGTGGACAAGAGCCGGTGGCAG
GAGGGCAACGTCTTTAGCTGCTCCGTGATGCACGAGGCCCTGCACAACCA
CTACACCCAGAAGAGCCTGAGCCTGTCCCTGGGCAAGATG

[0474] In embodiments, the CAR scFv fragments are cloned into lentiviral vectors to create a full length CAR construct in a single coding frame, and using a promoter, e.g., EF1 alpha promoter, for expression (SEQ ID NO: 11).

EF1 alpha promoter

(SEQ ID NO: 11)

CGTGAGGCTCCGGTGCCCGTCAGTGGGCAGAGCGCACATCGCCCACAGTC
CCCGAGAAGTTGGGGGGAGGGGTCGGCAATTGAACCGGTGCCTAGAGAAG
GTGGCGCGGGGTAAACTGGGAAAGTGATGTCGTGTACTGGCTCCGCCTTT
TTCCCGAGGGTGGGGGAGAACCGTATATAAGTGCAGTAGTCGCCGTGAAC
GTTCTTTTTCGCAACGGGTTTGCCGCCAGAACACAGGTAAGTGCCGTGTG
TGGTTCCCGCGGGCCTGGCCTCTTTACGGGTTATGGCCCTTGCGTGCCTT
GAATTACTTCCACCTGGCTGCAGTACGTGATTCTTGATCCCGAGCTTCGG
GTTGGAAGTGGGTGGGAGAGTTCGAGGCCTTGCGCTTAAGGAGCCCCTTC
GCCTCGTGCTTGAGTTGAGGCCTGGCCTGGGCGCTGGGGCCGCCGCGTGC
GAATCTGGTGGCACCTTCGCGCCTGTCTCGCTGCTTTCGATAAGTCTCTA
GCCATTTAAAATTTTTGATGACCTGCTGCGACGCTTTTTTTCTGGCAAGA
TAGTCTTGTAAATGCGGGCCAAGATCTGCACACTGGTATTTCGGTTTTTG
GGGCCGCGGGCGGCGACGGGGCCCGTGCGTCCCAGCGCACATGTTCGGCG
AGGCGGGGCCTGCGAGCGCGGCCACCGAGAATCGGACGGGGGTAGTCTCA
AGCTGGCCGGCCTGCTCTGGTGCCTGGCCTCGCGCCGCCGTGTATCGCCC
CGCCCTGGGCGGCAAGGCTGGCCCGGTCGGCACCAGTTGCGTGAGCGGAA
AGATGGCCGCTTCCCGGCCCTGCTGCAGGGAGCTCAAAATGGAGGACGCG
GCGCTCGGGAGAGCGGGCGGGTGAGTCACCCACACAAAGGAAAAGGGCCT
TTCCGTCCTCAGCCGTCGCTTCATGTGACTCCACGGAGTACCGGGCGCCG
TCCAGGCACCTCGATTAGTTCTCGAGCTTTTGGAGTACGTCGTCTTTAGG
TTGGGGGGAGGGGTTTTATGCGATGGAGTTTCCCCACACTGAGTGGGTGG
AGACTGAAGTTAGGCCAGCTTGGCACTTGATGTAATTCTCCTTGGAATTT
GCCCTTTTTGAGTTTGGATCTTGGTTCATTCTCAAGCCTCAGACAGTGGT
TCAAAGTTTTTTTCTTCCATTTCAGGTGTCGTGA.
Gly/Ser

(SEQ ID NO: 25)

GGGGS
Gly/Ser (SEQ ID NO: 26): This sequence may
encompass 1-6 “Gly Gly Gly Gly Ser” repeating
units
GGGGSGGGGS GGGGSGGGGS GGGGSGGGGS
Gly/Ser

(SEQ ID NO: 27)

GGGGSGGGGSGGGGSGGGGS
Gly/Ser

(SEQ ID NO: 28)

GGGGSGGGGSGGGGS
Gly/Ser

(SEQ ID NO: 29)

GGGS
PolyA: (A)5000 (SEQ ID NO: 30)
PolyA: (T)100 (SEQ ID NO: 31)
PolyA: (T)5000 (SEQ ID NO: 32)
PolyA: (A)5000 (SEQ ID NO: 33)
PolyA: (A)400 (SEQ ID NO: 34)
PolyA: (A)2000 (SEQ ID NO: 35)
Gly/Ser (SEQ ID NO: 38): This sequence may
encompass 1-10 “Gly Gly Gly Ser” repeating units
GGGSGGGSGG GSGGGSGGGS GGGSGGGSGG GSGGGSGGGS

[0475] The amino acid and nucleic acid sequences of exemplary BCMA scFv domains and exemplary BCMA CAR molecules are provided in Table 1.

[0476] Table 2 below designates the nicknames for the BCMA CAR constructs with respect to the DNA ID number, also listed in Table 1.

TABLE 2
CAR construct IDs

| Nickname | Novartis ID | DNA2.0 ID |
|---|---|---|
| BCMA-1 | ER95-03VA | 139100 |
| BCMA-2 | UR96-08PA | 139101 |
| BCMA-3 | KR98-03KA | 139102 |
| BCMA-4 | JF32-78IB | 139103 |
| BCMA-5 | AR99-08FA | 139104 |
| BCMA-6 | ZF34-73CB | 139105 |
| BCMA-7 | QR91-12ZA | 139106 |
| BCMA-8 | GR92-17UA | 139107 |
| BCMA-9 | OG62-93QB | 139108 |
| BCMA-10 | EG63-98LB | 139109 |
| BCMA-11 | UG65-93FB | 139110 |
| BCMA-12 | HU13-58ZB | 139111 |
| BCMA-13 | KG66-98AB | 139112 |
| BCMA-14 | HJ64-62PB | 139113 |
| BCMA-15 | PY43-48LB | 139114 |

TABLE 1
Amino Acid and Nucleic Acid Sequences of exemplary anti-BCMA scFv
domains and BCMA CAR molecules
The amino acid sequences variable heavy chain and variable light chain
sequences for each scFv is also provided. Table 2 lists names and CAR
construct IDs for several BCMA CARs.
The signal peptide MALPVTALLLPLALLLHAARP (SEQ ID NO: 1) is
underlined in each full-length CAR sequence.

| | | |
|---|---|---|
| | SEQ | |
| Name/ | ID | |
| Description | NO: | Sequence |

139109

| | | |
|---|---|---|
| 139109-aa | 49 | EVQLVESGGGLVQPGGSLRLSCAVSGFALSNHGMSWVRRAPGKGLEWVSGIVY |
| ScFv domain | | SGSTYYAASVKGRFTISRDNSRNTLYLQMNSLRPEDTAIYYCSAHGGESDVWG |
| | | QGTTVTVSSASGGGGSGGRASGGGGSDIQLTQSPSSLSASVGDRVTITCRASQ |
| | | SISSYLNWYQQKPGKAPKLLIYAASSLQSGVPSRFSGSGSGTDFTLTISSLQP |
| | | EDFATYYCQQSYSTPYTFGQGTKVEIK |
| 139109-nt | 64 | GAAGTGCAATTGGTGGAATCAGGGGGAGGACTTGTGCAGCCTGGAGGATCGCT |
| ScFv domain | | GAGACTGTCATGTGCCGTGTCCGGCTTTGCCCTGTCCAACCACGGGATGTCCT |
| | | GGGTCCGCCGCGCGCCTGGAAAGGGCCTCGAATGGGTGTCGGGTATTGTGTAC |
| | | AGCGGTAGCACCTACTATGCCGCATCCGTGAAGGGGAGATTCACCATCAGCCG |
| | | GGACAACTCCAGGAACACTCTGTACCTCCAAATGAATTCGCTGAGGCCAGAGG |
| | | ACACTGCCATCTACTACTGCTCCGCGCATGGCGGAGAGTCCGACGTCTGGGGA |
| | | CAGGGGACCACCGTGACCGTGTCTAGCGCGTCCGGCGGAGGCGGCAGCGGGGG |
| | | TCGGGCATCAGGGGGCGGCGGATCGGACATCCAGCTCACCCAGTCCCCGAGCT |
| | | CGCTGTCCGCCTCCGTGGGAGATCGGGTCACCATCACGTGCCGCGCCAGCCAG |
| | | TCGATTTCCTCCTACCTGAACTGGTACCAACAGAAGCCCGGAAAAGCCCCGAA |
| | | GCTTCTCATCTACGCCGCCTCGAGCCTGCAGTCAGGAGTGCCCTCACGGTTCT |
| | | CCGGCTCCGGTTCCGGTACTGATTTCACCCTGACCATTTCCTCCCTGCAACCG |
| | | GAGGACTTCGCTACTTACTACTGCCAGCAGTCGTACTCCACCCCCTACACTTT |
| | | CGGACAAGGCACCAAGGTCGAAATCAAG |
| 139109-aa | 79 | EVQLVESGGGLVQPGGSLRLSCAVSGFALSNHGMSWVRRAPGKGLEWVSGIVY |
| VH | | SGSTYYAASVKGRFTISRDNSRNTLYLQMNSLRPEDTAIYYCSAHGGESDVWG |
| | | QGTTVTVSS |
| 139109-aa | 94 | DIQLTQSPSSLSASVGDRVTITCRASQSISSYLNWYQQKPGKAPKLLIYAASS |
| VL | | LQSGVPSRFSGSGSGTDFTLTISSLQPEDFATYYCQQSYSTPYTFGQGTKVEI |
| | | K |
| 139109-aa | 109 | MALPVTALLLPLALLLHAARPEVQLVESGGGLVQPGGSLRLSCAVSGFALSNH |
| Full CAR | | GMSWVRRAPGKGLEWVSGIVYSGSTYYAASVKGRFTISRDNSRNTLYLQMNSL |
| | | RPEDTAIYYCSAHGGESDVWGQGTTVTVSSASGGGGSGGRASGGGGSDIQLTQ |
| | | SPSSLSASVGDRVTITCRASQSISSYLNWYQQKPGKAPKLLIYAASSLQSGVP |
| | | SRFSGSGSGTDFTLTISSLQPEDFATYYCQQSYSTPYTFGQGTKVEIKTTTPA |
| | | PRPPTPAPTIASQPLSLRPEACRPAAGGAVHTRGLDFACDIYIWAPLAGTCGV |
| | | LLLSLVITLYCKRGRKKLLYIFKQPFMRPVQTTQEEDGCSCRFPEEEEGGCEL |
| | | RVKFSRSADAPAYKQGQNQLYNELNLGRREEYDVLDKRRGRDPEMGGKPRRKN |
| | | PQEGLYNELQKDKMAEAYSEIGMKGERRRGKGHDGLYQGLSTATKDTYDALHM |
| | | QALPPR |
| 139109-nt | 124 | ATGGCCCTCCCTGTCACCGCCCTGCTGCTTCCGCTGGCTCTTCTGCTCCACGC |
| Full CAR | | CGCTCGGCCCGAAGTGCAATTGGTGGAATCAGGGGGAGGACTTGTGCAGCCTG |
| | | GAGGATCGCTGAGACTGTCATGTGCCGTGTCCGGCTTTGCCCTGTCCAACCAC |
| | | GGGATGTCCTGGGTCCGCCGCGCGCCTGGAAAGGGCCTCGAATGGGTGTCGGG |
| | | TATTGTGTACAGCGGTAGCACCTACTATGCCGCATCCGTGAAGGGGAGATTCA |
| | | CCATCAGCCGGGACAACTCCAGGAACACTCTGTACCTCCAAATGAATTCGCTG |
| | | AGGCCAGAGGACACTGCCATCTACTACTGCTCCGCGCATGGCGGAGAGTCCGA |
| | | CGTCTGGGGACAGGGGACCACCGTGACCGTGTCTAGCGCGTCCGGCGGAGGCG |
| | | GCAGCGGGGGTCGGGCATCAGGGGGCGGCGGATCGGACATCCAGCTCACCCAG |
| | | TCCCCGAGCTCGCTGTCCGCCTCCGTGGGAGATCGGGTCACCATCACGTGCCG |
| | | CGCCAGCCAGTCGATTTCCTCCTACCTGAACTGGTACCAACAGAAGCCCGGAA |
| | | AAGCCCCGAAGCTTCTCATCTACGCCGCCTCGAGCCTGCAGTCAGGAGTGCCC |
| | | TCACGGTTCTCCGGCTCCGGTTCCGGTACTGATTTCACCCTGACCATTTCCTC |
| | | CCTGCAACCGGAGGACTTCGCTACTTACTACTGCCAGCAGTCGTACTCCACCC |
| | | CCTACACTTTCGGACAAGGCACCAAGGTCGAAATCAAGACCACTACCCCAGCA |
| | | CCGAGGCCACCCACCCCGGCTCCTACCATCGCCTCCCAGCCTCTGTCCCTGCG |
| | | TCCGGAGGCATGTAGACCCGCAGCTGGTGGGGCCGTGCATACCCGGGGTCTTG |
| | | ACTTCGCCTGCGATATCTACATTTGGGCCCCTCTGGCTGGTACTTGCGGGGTC |
| | | CTGCTGCTTTCACTCGTGATCACTCTTTACTGTAAGCGCGGTCGGAAGAAGCT |
| | | GCTGTACATCTTTAAGCAACCCTTCATGAGGCCTGTGCAGACTACTCAAGAGG |
| | | AGGACGGCTGTTCATGCCGGTTCCCAGAGGAGGAGGAAGGCGGCTGCGAACTG |
| | | CGCGTGAAATTCAGCCGCAGCGCAGATGCTCCAGCCTACAAGCAGGGGCAGAA |
| | | CCAGCTCTACAACGAACTCAATCTTGGTCGGAGAGAGGAGTACGACGTGCTGG |
| | | ACAAGCGGAGAGGACGGGACCCAGAAATGGGCGGGAAGCCGCGCAGAAAGAAT |
| | | CCCCAAGAGGGCCTGTACAACGAGCTCCAAAAGGATAAGATGGCAGAAGCCTA |
| | | TAGCGAGATTGGTATGAAAGGGGAACGCAGAAGAGGCAAAGGCCACGACGGAC |
| | | TGTACCAGGGACTCAGCACCGCCACCAAGGACACCTATGACGCTCTTCACATG |
| | | CAGGCCCTGCCGCCTCGG |

139103

| | | |
|---|---|---|
| 139103-aa | 39 | QVQLVESGGGLVQPGRSLRLSCAASGFTFSNYAMSWVRQAPGKGLGWVSGISR |
| ScFv domain | | SGENTYYADSVKGRFTISRDNSKNTLYLQMNSLRDEDTAVYYCARSPAHYYGG |
| | | MDVWGQGTTVTVSSASGGGGSGGRASGGGGSDIVLTQSPGTLSLSPGERATLS |
| | | CRASQSISSSFLAWYQQKPGQAPRLLIYGASRRATGIPDRFSGSGSGTDFTLT |
| | | ISRLEPEDSAVYYCQQYHSSPSWTFGQGTKLEIK |
| 139103-nt | 54 | CAAGTGCAACTCGTGGAATCTGGTGGAGGACTCGTGCAACCCGGAAGATCGCT |
| ScFv domain | | TAGACTGTCGTGTGCCGCCAGCGGGTTCACTTTCTCGAACTACGCGATGTCCT |
| | | GGGTCCGCCAGGCACCCGGAAAGGGACTCGGTTGGGTGTCCGGCATTTCCCGG |
| | | TCCGGCGAAAATACCTACTACGCCGACTCCGTGAAGGGCCGCTTCACCATCTC |
| | | AAGGGACAACAGCAAAAACACCCTGTACTTGCAAATGAACTCCCTGCGGGATG |
| | | AAGATACAGCCGTGTACTATTGCGCCCGGTCGCCTGCCCATTACTACGGCGGA |
| | | ATGGACGTCTGGGGACAGGGAACCACTGTGACTGTCAGCAGCGCGTCGGGTGG |
| | | CGGCGGCTCAGGGGGTCGGGCCTCCGGGGGGGGAGGGTCCGACATCGTGCTGA |
| | | CCCAGTCCCCGGGAACCCTGAGCCTGAGCCCGGGAGAGCGCGCGACCCTGTCA |
| | | TGCCGGGCATCCCAGAGCATTAGCTCCTCCTTTCTCGCCTGGTATCAGCAGAA |
| | | GCCCGGACAGGCCCCGAGGCTGCTGATCTACGGCGCTAGCAGAAGGGCTACCG |
| | | GAATCCCAGACCGGTTCTCCGGCTCCGGTTCCGGGACCGATTTCACCCTTACT |
| | | ATCTCGCGCCTGGAACCTGAGGACTCCGCCGTCTACTACTGCCAGCAGTACCA |
| | | CTCATCCCCGTCGTGGACGTTCGGACAGGGCACCAAGCTGGAGATTAAG |
| 139103-aa | 69 | QVQLVESGGGLVQPGRSLRLSCAASGFTFSNYAMSWVRQAPGKGLGWVSGISR |
| VH | | SGENTYYADSVKGRFTISRDNSKNTLYLQMNSLRDEDTAVYYCARSPAHYYGG |
| | | MDVWGQGTTVTVSS |
| 139103-aa | 84 | DIVLTQSPGTLSLSPGERATLSCRASQSISSSFLAWYQQKPGQAPRLLIYGAS |
| VL | | RRATGIPDRFSGSGSGTDFTLTISRLEPEDSAVYYCQQYHSSPSWTFGQGTKL |
| | | EIK |
| 139103-aa | 99 | MALPVTALLLPLALLLHAARPQVQLVESGGGLVQPGRSLRLSCAASGFTFSNY |
| Full CAR | | AMSWVRQAPGKGLGWVSGISRSGENTYYADSVKGRFTISRDNSKNTLYLQMNS |
| | | LRDEDTAVYYCARSPAHYYGGMDVWGQGTTVTVSSASGGGGSGGRASGGGGSD |
| | | IVLTQSPGTLSLSPGERATLSCRASQSISSSFLAWYQQKPGQAPRLLIYGASR |
| | | RATGIPDRFSGSGSGTDFTLTISRLEPEDSAVYYCQQYHSSPSWTFGQGTKLE |
| | | IKTTTPAPRPPTPAPTIASQPLSLRPEACRPAAGGAVHTRGLDFACDIYIWAP |
| | | LAGTCGVLLLSLVITLYCKRGRKKLLYIFKQPFMRPVQTTQEEDGCSCRFPEE |
| | | EEGGCELRVKFSRSADAPAYKQGQNQLYNELNLGRREEYDVLDKRRGRDPEMG |
| | | GKPRRKNPQEGLYNELQKDKMAEAYSEIGMKGERRRGKGHDGLYQGLSTATKD |
| | | TYDALHMQALPPR |
| 139103-nt | 114 | ATGGCCCTCCCTGTCACCGCCCTGCTGCTTCCGCTGGCTCTTCTGCTCCACGC |
| Full CAR | | CGCTCGGCCCCAAGTGCAACTCGTGGAATCTGGTGGAGGACTCGTGCAACCCG |
| | | GAAGATCGCTTAGACTGTCGTGTGCCGCCAGCGGGTTCACTTTCTCGAACTAC |
| | | GCGATGTCCTGGGTCCGCCAGGCACCCGGAAAGGGACTCGGTTGGGTGTCCGG |
| | | CATTTCCCGGTCCGGCGAAAATACCTACTACGCCGACTCCGTGAAGGGCCGCT |
| | | TCACCATCTCAAGGGACAACAGCAAAAACACCCTGTACTTGCAAATGAACTCC |
| | | CTGCGGGATGAAGATACAGCCGTGTACTATTGCGCCCGGTCGCCTGCCCATTA |
| | | CTACGGCGGAATGGACGTCTGGGGACAGGGAACCACTGTGACTGTCAGCAGCG |
| | | CGTCGGGTGGCGGCGGCTCAGGGGGTCGGGCCTCCGGGGGGGGAGGGTCCGAC |
| | | ATCGTGCTGACCCAGTCCCCGGGAACCCTGAGCCTGAGCCCGGGAGAGCGCGC |
| | | GACCCTGTCATGCCGGGCATCCCAGAGCATTAGCTCCTCCTTTCTCGCCTGGT |
| | | ATCAGCAGAAGCCCGGACAGGCCCCGAGGCTGCTGATCTACGGCGCTAGCAGA |
| | | AGGGCTACCGGAATCCCAGACCGGTTCTCCGGCTCCGGTTCCGGGACCGATTT |
| | | CACCCTTACTATCTCGCGCCTGGAACCTGAGGACTCCGCCGTCTACTACTGCC |
| | | AGCAGTACCACTCATCCCCGTCGTGGACGTTCGGACAGGGCACCAAGCTGGAG |
| | | ATTAAGACCACTACCCCAGCACCGAGGCCACCCACCCCGGCTCCTACCATCGC |
| | | CTCCCAGCCTCTGTCCCTGCGTCCGGAGGCATGTAGACCCGCAGCTGGTGGGG |
| | | CCGTGCATACCCGGGGTCTTGACTTCGCCTGCGATATCTACATTTGGGCCCCT |
| | | CTGGCTGGTACTTGCGGGGTCCTGCTGCTTTCACTCGTGATCACTCTTTACTG |
| | | TAAGCGCGGTCGGAAGAAGCTGCTGTACATCTTTAAGCAACCCTTCATGAGGC |
| | | CTGTGCAGACTACTCAAGAGGAGGACGGCTGTTCATGCCGGTTCCCAGAGGAG |
| | | GAGGAAGGCGGCTGCGAACTGCGCGTGAAATTCAGCCGCAGCGCAGATGCTCC |
| | | AGCCTACAAGCAGGGGCAGAACCAGCTCTACAACGAACTCAATCTTGGTCGGA |
| | | GAGAGGAGTACGACGTGCTGGACAAGCGGAGAGGACGGGACCCAGAAATGGGC |
| | | GGGAAGCCGCGCAGAAAGAATCCCCAAGAGGGCCTGTACAACGAGCTCCAAAA |
| | | GGATAAGATGGCAGAAGCCTATAGCGAGATTGGTATGAAAGGGGAACGCAGAA |
| | | GAGGCAAAGGCCACGACGGACTGTACCAGGGACTCAGCACCGCCACCAAGGAC |
| | | ACCTATGACGCTCTTCACATGCAGGCCCTGCCGCCTCGG |

139105

| | | |
|---|---|---|
| 139105-aa | 40 | QVQLVESGGGLVQPGRSLRLSCAASGFTFDDYAMHWVRQAPGKGLEWVSGISW |
| ScFv domain | | NSGSIGYADSVKGRFTISRDNAKNSLYLQMNSLRAEDTALYYCSVHSFLAYWG |
| | | QGTLVTVSSASGGGGSGGRASGGGGSDIVMTQTPLSLPVTPGEPASISCRSSQ |
| | | SLLHSNGYNYLDWYLQKPGQSPQLLIYLGSNRASGVPDRFSGSGSGTDFTLKI |
| | | SRVEAEDVGVYYCMQALQTPYTFGQGTKVEIK |
| 139105-nt | 55 | CAAGTGCAACTCGTCGAATCCGGTGGAGGTCTGGTCCAACCTGGTAGAAGCCT |
| ScFv domain | | GAGACTGTCGTGTGCGGCCAGCGGATTCACCTTTGATGACTATGCTATGCACT |
| | | GGGTGCGGCAGGCCCCAGGAAAGGGCCTGGAATGGGTGTCGGGAATTAGCTGG |
| | | AACTCCGGGTCCATTGGCTACGCCGACTCCGTGAAGGGCCGCTTCACCATCTC |
| | | CCGCGACAACGCAAAGAACTCCCTGTACTTGCAAATGAACTCGCTCAGGGCTG |
| | | AGGATACCGCGCTGTACTACTGCTCCGTGCATTCCTTCCTGGCCTACTGGGGA |
| | | CAGGGAACTCTGGTCACCGTGTCGAGCGCCTCCGGCGGCGGGGGCTCGGGTGG |
| | | ACGGGCCTCGGGCGGAGGGGGGTCCGACATCGTGATGACCCAGACCCCGCTGA |
| | | GCTTGCCCGTGACTCCCGGAGAGCCTGCATCCATCTCCTGCCGGTCATCCCAG |
| | | TCCCTTCTCCACTCCAACGGATACAACTACCTCGACTGGTACCTCCAGAAGCC |
| | | GGGACAGAGCCCTCAGCTTCTGATCTACCTGGGGTCAAATAGAGCCTCAGGAG |
| | | TGCCGGATCGGTTCAGCGGATCTGGTTCGGGAACTGATTTCACTCTGAAGATT |
| | | TCCCGCGTGGAAGCCGAGGACGTGGGCGTCTACTACTGTATGCAGGCGCTGCA |
| | | GACCCCCTATACCTTCGGCCAAGGGACGAAAGTGGAGATCAAG |
| 139105-aa | 70 | QVQLVESGGGLVQPGRSLRLSCAASGFTFDDYAMHWVRQAPGKGLEWVSGISW |
| VH | | NSGSIGYADSVKGRFTISRDNAKNSLYLQMNSLRAEDTALYYCSVHSFLAYWG |
| | | QGTLVTVSS |
| 139105-aa | 85 | DIVMTQTPLSLPVTPGEPASISCRSSQSLLHSNGYNYLDWYLQKPGQSPQLLI |
| VL | | YLGSNRASGVPDRFSGSGSGTDFTLKISRVEAEDVGVYYCMQALQTPYTFGQG |
| | | TKVEIK |
| 139105-aa | 100 | MALPVTALLLPLALLLHAARPQVQLVESGGGLVQPGRSLRLSCAASGFTFDDY |
| Full CAR | | AMHWVRQAPGKGLEWVSGISWNSGSIGYADSVKGRFTISRDNAKNSLYLQMNS |
| | | LRAEDTALYYCSVHSFLAYWGQGTLVTVSSASGGGGSGGRASGGGGSDIVMTQ |
| | | TPLSLPVTPGEPASISCRSSQSLLHSNGYNYLDWYLQKPGQSPQLLIYLGSNR |
| | | ASGVPDRFSGSGSGTDFTLKISRVEAEDVGVYYCMQALQTPYTFGQGTKVEIK |
| | | TTTPAPRPPTPAPTIASQPLSLRPEACRPAAGGAVHTRGLDFACDIYIWAPLA |
| | | GTCGVLLLSLVITLYCKRGRKKLLYIFKQPFMRPVQTTQEEDGCSCRFPEEEE |
| | | GGCELRVKFSRSADAPAYKQGQNQLYNELNLGRREEYDVLDKRRGRDPEMGGK |
| | | PRRKNPQEGLYNELQKDKMAEAYSEIGMKGERRRGKGHDGLYQGLSTATKDTY |
| | | DALHMQALPPR |
| 139105-nt | 115 | ATGGCCCTCCCTGTCACCGCCCTGCTGCTTCCGCTGGCTCTTCTGCTCCACGC |
| Full CAR | | CGCTCGGCCCCAAGTGCAACTCGTCGAATCCGGTGGAGGTCTGGTCCAACCTG |
| | | GTAGAAGCCTGAGACTGTCGTGTGCGGCCAGCGGATTCACCTTTGATGACTAT |
| | | GCTATGCACTGGGTGCGGCAGGCCCCAGGAAAGGGCCTGGAATGGGTGTCGGG |
| | | AATTAGCTGGAACTCCGGGTCCATTGGCTACGCCGACTCCGTGAAGGGCCGCT |
| | | TCACCATCTCCCGCGACAACGCAAAGAACTCCCTGTACTTGCAAATGAACTCG |
| | | CTCAGGGCTGAGGATACCGCGCTGTACTACTGCTCCGTGCATTCCTTCCTGGC |
| | | CTACTGGGGACAGGGAACTCTGGTCACCGTGTCGAGCGCCTCCGGCGGCGGGG |
| | | GCTCGGGTGGACGGGCCTCGGGCGGAGGGGGGTCCGACATCGTGATGACCCAG |
| | | ACCCCGCTGAGCTTGCCCGTGACTCCCGGAGAGCCTGCATCCATCTCCTGCCG |
| | | GTCATCCCAGTCCCTTCTCCACTCCAACGGATACAACTACCTCGACTGGTACC |
| | | TCCAGAAGCCGGGACAGAGCCCTCAGCTTCTGATCTACCTGGGGTCAAATAGA |
| | | GCCTCAGGAGTGCCGGATCGGTTCAGCGGATCTGGTTCGGGAACTGATTTCAC |
| | | TCTGAAGATTTCCCGCGTGGAAGCCGAGGACGTGGGCGTCTACTACTGTATGC |
| | | AGGCGCTGCAGACCCCCTATACCTTCGGCCAAGGGACGAAAGTGGAGATCAAG |
| | | ACCACTACCCCAGCACCGAGGCCACCCACCCCGGCTCCTACCATCGCCTCCCA |
| | | GCCTCTGTCCCTGCGTCCGGAGGCATGTAGACCCGCAGCTGGTGGGGCCGTGC |
| | | ATACCCGGGGTCTTGACTTCGCCTGCGATATCTACATTTGGGCCCCTCTGGCT |
| | | GGTACTTGCGGGGTCCTGCTGCTTTCACTCGTGATCACTCTTTACTGTAAGCG |
| | | CGGTCGGAAGAAGCTGCTGTACATCTTTAAGCAACCCTTCATGAGGCCTGTGC |
| | | AGACTACTCAAGAGGAGGACGGCTGTTCATGCCGGTTCCCAGAGGAGGAGGAA |
| | | GGCGGCTGCGAACTGCGCGTGAAATTCAGCCGCAGCGCAGATGCTCCAGCCTA |
| | | CAAGCAGGGGCAGAACCAGCTCTACAACGAACTCAATCTTGGTCGGAGAGAGG |
| | | AGTACGACGTGCTGGACAAGCGGAGAGGACGGGACCCAGAAATGGGCGGGAAG |
| | | CCGCGCAGAAAGAATCCCCAAGAGGGCCTGTACAACGAGCTCCAAAAGGATAA |
| | | GATGGCAGAAGCCTATAGCGAGATTGGTATGAAAGGGGAACGCAGAAGAGGCA |
| | | AAGGCCACGACGGACTGTACCAGGGACTCAGCACCGCCACCAAGGACACCTAT |
| | | GACGCTCTTCACATGCAGGCCCTGCCGCCTCGG |

139111

| | | |
|---|---|---|
| 139111-aa | 41 | EVQLLESGGGLVQPGGSLRLSCAVSGFALSNHGMSWVRRAPGKGLEWVSGIVY |
| ScFv domain | | SGSTYYAASVKGRFTISRDNSRNTLYLQMNSLRPEDTAIYYCSAHGGESDVWG |
| | | QGTTVTVSSASGGGGSGGRASGGGGSDIVMTQTPLSLSVTPGQPASISCKSSQ |
| | | SLLRNDGKTPLYWYLQKAGQPPQLLIYEVSNRFSGVPDRFSGSGSGTDFTLKI |
| | | SRVEAEDVGAYYCMQNIQFPSFGGGTKLEIK |
| 139111-nt | 56 | GAAGTGCAATTGTTGGAATCTGGAGGAGGACTTGTGCAGCCTGGAGGATCACT |
| ScFv domain | | GAGACTTTCGTGTGCGGTGTCAGGCTTCGCCCTGAGCAACCACGGCATGAGCT |
| | | GGGTGCGGAGAGCCCCGGGGAAGGGTCTGGAATGGGTGTCCGGGATCGTCTAC |
| | | TCCGGTTCAACTTACTACGCCGCAAGCGTGAAGGGTCGCTTCACCATTTCCCG |
| | | CGATAACTCCCGGAACACCCTGTACCTCCAAATGAACTCCCTGCGGCCCGAGG |
| | | ACACCGCCATCTACTACTGTTCCGCGCATGGAGGAGAGTCCGATGTCTGGGGA |
| | | CAGGGCACTACCGTGACCGTGTCGAGCGCCTCGGGGGGAGGAGGCTCCGGCGG |
| | | TCGCGCCTCCGGGGGGGGTGGCAGCGACATTGTGATGACGCAGACTCCACTCT |
| | | CGCTGTCCGTGACCCCGGGACAGCCCGCGTCCATCTCGTGCAAGAGCTCCCAG |
| | | AGCCTGCTGAGGAACGACGGAAAGACTCCTCTGTATTGGTACCTCCAGAAGGC |
| | | TGGACAGCCCCCGCAACTGCTCATCTACGAAGTGTCAAATCGCTTCTCCGGGG |
| | | TGCCGGATCGGTTTTCCGGCTCGGGATCGGGCACCGACTTCACCCTGAAAATC |
| | | TCCAGGGTCGAGGCCGAGGACGTGGGAGCCTACTACTGCATGCAAAACATCCA |
| | | GTTCCCTTCCTTCGGCGGCGGCACAAAGCTGGAGATTAAG |
| 139111-aa | 71 | EVQLLESGGGLVQPGGSLRLSCAVSGFALSNHGMSWVRRAPGKGLEWVSGIVY |
| VH | | SGSTYYAASVKGRFTISRDNSRNTLYLQMNSLRPEDTAIYYCSAHGGESDVWG |
| | | QGTTVTVSS |
| 139111-aa | 86 | DIVMTQTPLSLSVTPGQPASISCKSSQSLLRNDGKTPLYWYLQKAGQPPQLLI |
| VL | | YEVSNRFSGVPDRFSGSGSGTDFTLKISRVEAEDVGAYYCMQNIQFPSFGGGT |
| | | KLEIK |
| 139111-aa | 101 | MALPVTALLLPLALLLHAARPEVQLLESGGGLVQPGGSLRLSCAVSGFALSNH |
| Full CAR | | GMSWVRRAPGKGLEWVSGIVYSGSTYYAASVKGRFTISRDNSRNTLYLQMNSL |
| | | RPEDTAIYYCSAHGGESDVWGQGTTVTVSSASGGGGSGGRASGGGGSDIVMTQ |
| | | TPLSLSVTPGQPASISCKSSQSLLRNDGKTPLYWYLQKAGQPPQLLIYEVSNR |
| | | FSGVPDRFSGSGSGTDFTLKISRVEAEDVGAYYCMQNIQFPSFGGGTKLEIKT |
| | | TTPAPRPPTPAPTIASQPLSLRPEACRPAAGGAVHTRGLDFACDIYIWAPLAG |
| | | TCGVLLLSLVITLYCKRGRKKLLYIFKQPFMRPVQTTQEEDGCSCRFPEEEEG |
| | | GCELRVKFSRSADAPAYKQGQNQLYNELNLGRREEYDVLDKRRGRDPEMGGKP |
| | | RRKNPQEGLYNELQKDKMAEAYSEIGMKGERRRGKGHDGLYQGLSTATKDTYD |
| | | ALHMQALPPR |
| 139111-nt | 116 | ATGGCCCTCCCTGTCACCGCCCTGCTGCTTCCGCTGGCTCTTCTGCTCCACGC |
| Full CAR | | CGCTCGGCCCGAAGTGCAATTGTTGGAATCTGGAGGAGGACTTGTGCAGCCTG |
| | | GAGGATCACTGAGACTTTCGTGTGCGGTGTCAGGCTTCGCCCTGAGCAACCAC |
| | | GGCATGAGCTGGGTGCGGAGAGCCCCGGGGAAGGGTCTGGAATGGGTGTCCGG |
| | | GATCGTCTACTCCGGTTCAACTTACTACGCCGCAAGCGTGAAGGGTCGCTTCA |
| | | CCATTTCCCGCGATAACTCCCGGAACACCCTGTACCTCCAAATGAACTCCCTG |
| | | CGGCCCGAGGACACCGCCATCTACTACTGTTCCGCGCATGGAGGAGAGTCCGA |
| | | TGTCTGGGGACAGGGCACTACCGTGACCGTGTCGAGCGCCTCGGGGGGAGGAG |
| | | GCTCCGGCGGTCGCGCCTCCGGGGGGGGTGGCAGCGACATTGTGATGACGCAG |
| | | ACTCCACTCTCGCTGTCCGTGACCCCGGGACAGCCCGCGTCCATCTCGTGCAA |
| | | GAGCTCCCAGAGCCTGCTGAGGAACGACGGAAAGACTCCTCTGTATTGGTACC |
| | | TCCAGAAGGCTGGACAGCCCCCGCAACTGCTCATCTACGAAGTGTCAAATCGC |
| | | TTCTCCGGGGTGCCGGATCGGTTTTCCGGCTCGGGATCGGGCACCGACTTCAC |
| | | CCTGAAAATCTCCAGGGTCGAGGCCGAGGACGTGGGAGCCTACTACTGCATGC |
| | | AAAACATCCAGTTCCCTTCCTTCGGCGGCGGCACAAAGCTGGAGATTAAGACC |
| | | ACTACCCCAGCACCGAGGCCACCCACCCCGGCTCCTACCATCGCCTCCCAGCC |
| | | TCTGTCCCTGCGTCCGGAGGCATGTAGACCCGCAGCTGGTGGGGCCGTGCATA |
| | | CCCGGGGTCTTGACTTCGCCTGCGATATCTACATTTGGGCCCCTCTGGCTGGT |
| | | ACTTGCGGGGTCCTGCTGCTTTCACTCGTGATCACTCTTTACTGTAAGCGCGG |
| | | TCGGAAGAAGCTGCTGTACATCTTTAAGCAACCCTTCATGAGGCCTGTGCAGA |
| | | CTACTCAAGAGGAGGACGGCTGTTCATGCCGGTTCCCAGAGGAGGAGGAAGGC |
| | | GGCTGCGAACTGCGCGTGAAATTCAGCCGCAGCGCAGATGCTCCAGCCTACAA |
| | | GCAGGGGCAGAACCAGCTCTACAACGAACTCAATCTTGGTCGGAGAGAGGAGT |
| | | ACGACGTGCTGGACAAGCGGAGAGGACGGGACCCAGAAATGGGCGGGAAGCCG |
| | | CGCAGAAAGAATCCCCAAGAGGGCCTGTACAACGAGCTCCAAAAGGATAAGAT |
| | | GGCAGAAGCCTATAGCGAGATTGGTATGAAAGGGGAACGCAGAAGAGGCAAAG |
| | | GCCACGACGGACTGTACCAGGGACTCAGCACCGCCACCAAGGACACCTATGAC |
| | | GCTCTTCACATGCAGGCCCTGCCGCCTCGG |

139100

| | | |
|---|---|---|
| 139100-aa | 42 | QVQLVQSGAEVRKTGASVKVSCKASGYIFDNFGINWVRQAPGQGLEWMGWINP |
| ScFv domain | | KNNNTNYAQKFQGRVTITADESTNTAYMEVSSLRSEDTAVYYCARGPYYYQSY |
| | | MDVWGQGTMVTVSSASGGGGSGGRASGGGGSDIVMTQTPLSLPVTPGEPASIS |
| | | CRSSQSLLHSNGYNYLNWYLQKPGQSPQLLIYLGSKRASGVPDRFSGSGSGTD |
| | | FTLHITRVGAEDVGVYYCMQALQTPYTFGQGTKLEIK |
| 139100-nt | 57 | CAAGTCCAACTCGTCCAGTCCGGCGCAGAAGTCAGAAAAACCGGTGCTAGCGT |
| ScFv domain | | GAAAGTGTCCTGCAAGGCCTCCGGCTACATTTTCGATAACTTCGGAATCAACT |
| | | GGGTCAGACAGGCCCCGGGCCAGGGGCTGGAATGGATGGGATGGATCAACCCC |
| | | AAGAACAACAACACCAACTACGCACAGAAGTTCCAGGGCCGCGTGACTATCAC |
| | | CGCCGATGAATCGACCAATACCGCCTACATGGAGGTGTCCTCCCTGCGGTCGG |
| | | AGGACACTGCCGTGTATTACTGCGCGAGGGGCCCATACTACTACCAAAGCTAC |
| | | ATGGACGTCTGGGGACAGGGAACCATGGTGACCGTGTCATCCGCCTCCGGTGG |
| | | TGGAGGCTCCGGGGGGCGGGCTTCAGGAGGCGGAGGAAGCGATATTGTGATGA |
| | | CCCAGACTCCGCTTAGCCTGCCCGTGACTCCTGGAGAACCGGCCTCCATTTCC |
| | | TGCCGGTCCTCGCAATCACTCCTGCATTCCAACGGTTACAACTACCTGAATTG |
| | | GTACCTCCAGAAGCCTGGCCAGTCGCCCCAGTTGCTGATCTATCTGGGCTCGA |
| | | AGCGCGCCTCCGGGGTGCCTGACCGGTTTAGCGGATCTGGGAGCGGCACGGAC |
| | | TTCACTCTCCACATCACCCGCGTGGGAGCGGAGGACGTGGGAGTGTACTACTG |
| | | TATGCAGGCGCTGCAGACTCCGTACACATTCGGACAGGGCACCAAGCTGGAGA |
| | | TCAAG |
| 139100-aa | 72 | QVQLVQSGAEVRKTGASVKVSCKASGYIFDNFGINWVRQAPGQGLEWMGWINP |
| VH | | KNNNTNYAQKFQGRVTITADESTNTAYMEVSSLRSEDTAVYYCARGPYYYQSY |
| | | MDVWGQGTMVTVSS |
| 139100-aa | 87 | DIVMTQTPLSLPVTPGEPASISCRSSQSLLHSNGYNYLNWYLQKPGQSPQLLI |
| VL | | YLGSKRASGVPDRFSGSGSGTDFTLHITRVGAEDVGVYYCMQALQTPYTFGQG |
| | | TKLEIK |
| 139100-aa | 102 | MALPVTALLLPLALLLHAARPQVQLVQSGAEVRKTGASVKVSCKASGYIFDNF |
| Full CAR | | GINWVRQAPGQGLEWMGWINPKNNNTNYAQKFQGRVTITADESTNTAYMEVSS |
| | | LRSEDTAVYYCARGPYYYQSYMDVWGQGTMVTVSSASGGGGSGGRASGGGGSD |
| | | IVMTQTPLSLPVTPGEPASISCRSSQSLLHSNGYNYLNWYLQKPGQSPQLLIY |
| | | LGSKRASGVPDRFSGSGSGTDFTLHITRVGAEDVGVYYCMQALQTPYTFGQGT |
| | | KLEIKTTTPAPRPPTPAPTIASQPLSLRPEACRPAAGGAVHTRGLDFACDIYI |
| | | WAPLAGTCGVLLLSLVITLYCKRGRKKLLYIFKQPFMRPVQTTQEEDGCSCRF |
| | | PEEEEGGCELRVKFSRSADAPAYKQGQNQLYNELNLGRREEYDVLDKRRGRDP |
| | | EMGGKPRRKNPQEGLYNELQKDKMAEAYSEIGMKGERRRGKGHDGLYQGLSTA |
| | | TKDTYDALHMQALPPR |
| 139100-nt | 117 | ATGGCCCTCCCTGTCACCGCCCTGCTGCTTCCGCTGGCTCTTCTGCTCCACGC |
| Full CAR | | CGCTCGGCCCCAAGTCCAACTCGTCCAGTCCGGCGCAGAAGTCAGAAAAACCG |
| | | GTGCTAGCGTGAAAGTGTCCTGCAAGGCCTCCGGCTACATTTTCGATAACTTC |
| | | GGAATCAACTGGGTCAGACAGGCCCCGGGCCAGGGGCTGGAATGGATGGGATG |
| | | GATCAACCCCAAGAACAACAACACCAACTACGCACAGAAGTTCCAGGGCCGCG |
| | | TGACTATCACCGCCGATGAATCGACCAATACCGCCTACATGGAGGTGTCCTCC |
| | | CTGCGGTCGGAGGACACTGCCGTGTATTACTGCGCGAGGGGCCCATACTACTA |
| | | CCAAAGCTACATGGACGTCTGGGGACAGGGAACCATGGTGACCGTGTCATCCG |
| | | CCTCCGGTGGTGGAGGCTCCGGGGGGCGGGCTTCAGGAGGCGGAGGAAGCGAT |
| | | ATTGTGATGACCCAGACTCCGCTTAGCCTGCCCGTGACTCCTGGAGAACCGGC |
| | | CTCCATTTCCTGCCGGTCCTCGCAATCACTCCTGCATTCCAACGGTTACAACT |
| | | ACCTGAATTGGTACCTCCAGAAGCCTGGCCAGTCGCCCCAGTTGCTGATCTAT |
| | | CTGGGCTCGAAGCGCGCCTCCGGGGTGCCTGACCGGTTTAGCGGATCTGGGAG |
| | | CGGCACGGACTTCACTCTCCACATCACCCGCGTGGGAGCGGAGGACGTGGGAG |
| | | TGTACTACTGTATGCAGGCGCTGCAGACTCCGTACACATTCGGACAGGGCACC |
| | | AAGCTGGAGATCAAGACCACTACCCCAGCACCGAGGCCACCCACCCCGGCTCC |
| | | TACCATCGCCTCCCAGCCTCTGTCCCTGCGTCCGGAGGCATGTAGACCCGCAG |
| | | CTGGTGGGGCCGTGCATACCCGGGGTCTTGACTTCGCCTGCGATATCTACATT |
| | | TGGGCCCCTCTGGCTGGTACTTGCGGGGTCCTGCTGCTTTCACTCGTGATCAC |
| | | TCTTTACTGTAAGCGCGGTCGGAAGAAGCTGCTGTACATCTTTAAGCAACCCT |
| | | TCATGAGGCCTGTGCAGACTACTCAAGAGGAGGACGGCTGTTCATGCCGGTTC |
| | | CCAGAGGAGGAGGAAGGCGGCTGCGAACTGCGCGTGAAATTCAGCCGCAGCGC |
| | | AGATGCTCCAGCCTACAAGCAGGGGCAGAACCAGCTCTACAACGAACTCAATC |
| | | TTGGTCGGAGAGAGGAGTACGACGTGCTGGACAAGCGGAGAGGACGGGACCCA |
| | | GAAATGGGCGGGAAGCCGCGCAGAAAGAATCCCCAAGAGGGCCTGTACAACGA |
| | | GCTCCAAAAGGATAAGATGGCAGAAGCCTATAGCGAGATTGGTATGAAAGGGG |
| | | AACGCAGAAGAGGCAAAGGCCACGACGGACTGTACCAGGGACTCAGCACCGCC |
| | | ACCAAGGACACCTATGACGCTCTTCACATGCAGGCCCTGCCGCCTCGG |

139101

| | | |
|---|---|---|
| 139101-aa | 43 | QVQLQESGGGLVQPGGSLRLSCAASGFTFSSDAMTWVRQAPGKGLEWVSVISG |
| ScFv domain | | SGGTTYYADSVKGRFTISRDNSKNTLYLQMNSLRAEDTAVYYCAKLDSSGYYY |
| | | ARGPRYWGQGTLVTVSSASGGGGSGGRASGGGGSDIQLTQSPSSLSASVGDRV |
| | | TITCRASQSISSYLNWYQQKPGKAPKLLIYGASTLASGVPARFSGSGSGTHFT |
| | | LTINSLQSEDSATYYCQQSYKRASFGQGTKVEIK |
| 139101-nt | 58 | CAAGTGCAACTTCAAGAATCAGGCGGAGGACTCGTGCAGCCCGGAGGATCATT |
| ScFv domain | | GCGGCTCTCGTGCGCCGCCTCGGGCTTCACCTTCTCGAGCGACGCCATGACCT |
| | | GGGTCCGCCAGGCCCCGGGGAAGGGGCTGGAATGGGTGTCTGTGATTTCCGGC |
| | | TCCGGGGGAACTACGTACTACGCCGATTCCGTGAAAGGTCGCTTCACTATCTC |
| | | CCGGGACAACAGCAAGAACACCCTTTATCTGCAAATGAATTCCCTCCGCGCCG |
| | | AGGACACCGCCGTGTACTACTGCGCCAAGCTGGACTCCTCGGGCTACTACTAT |
| | | GCCCGGGGTCCGAGATACTGGGGACAGGGAACCCTCGTGACCGTGTCCTCCGC |
| | | GTCCGGCGGAGGAGGGTCGGGAGGGCGGGCCTCCGGCGGCGGCGGTTCGGACA |
| | | TCCAGCTGACCCAGTCCCCATCCTCACTGAGCGCAAGCGTGGGCGACAGAGTC |
| | | ACCATTACATGCAGGGCGTCCCAGAGCATCAGCTCCTACCTGAACTGGTACCA |
| | | ACAGAAGCCTGGAAAGGCTCCTAAGCTGTTGATCTACGGGGCTTCGACCCTGG |
| | | CATCCGGGGTGCCCGCGAGGTTTAGCGGAAGCGGTAGCGGCACTCACTTCACT |
| | | CTGACCATTAACAGCCTCCAGTCCGAGGATTCAGCCACTTACTACTGTCAGCA |
| | | GTCCTACAAGCGGGCCAGCTTCGGACAGGGCACTAAGGTCGAGATCAAG |
| 139101-aa | 73 | QVQLQESGGGLVQPGGSLRLSCAASGFTFSSDAMTWVRQAPGKGLEWVSVISG |
| VH | | SGGTTYYADSVKGRFTISRDNSKNTLYLQMNSLRAEDTAVYYCAKLDSSGYYY |
| | | ARGPRYWGQGTLVTVSS |
| 139101-aa | 88 | DIQLTQSPSSLSASVGDRVTITCRASQSISSYLNWYQQKPGKAPKLLIYGAST |
| VL | | LASGVPARFSGSGSGTHFTLTINSLQSEDSATYYCQQSYKRASFGQGTKVEIK |
| 139101-aa | 103 | MALPVTALLLPLALLLHAARPQVQLQESGGGLVQPGGSLRLSCAASGFTFSSD |
| Full CAR | | AMTWVRQAPGKGLEWVSVISGSGGTTYYADSVKGRFTISRDNSKNTLYLQMNS |
| | | LRAEDTAVYYCAKLDSSGYYYARGPRYWGQGTLVTVSSASGGGGSGGRASGGG |
| | | GSDIQLTQSPSSLSASVGDRVTITCRASQSISSYLNWYQQKPGKAPKLLIYGA |
| | | STLASGVPARFSGSGSGTHFTLTINSLQSEDSATYYCQQSYKRASFGQGTKVE |
| | | IKTTTPAPRPPTPAPTIASQPLSLRPEACRPAAGGAVHTRGLDFACDIYIWAP |
| | | LAGTCGVLLLSLVITLYCKRGRKKLLYIFKQPFMRPVQTTQEEDGCSCRFPEE |
| | | EEGGCELRVKFSRSADAPAYKQGQNQLYNELNLGRREEYDVLDKRRGRDPEMG |
| | | GKPRRKNPQEGLYNELQKDKMAEAYSEIGMKGERRRGKGHDGLYQGLSTATKD |
| | | TYDALHMQALPPR |
| 139101-nt | 118 | ATGGCCCTCCCTGTCACCGCCCTGCTGCTTCCGCTGGCTCTTCTGCTCCACGC |
| Full CAR | | CGCTCGGCCCCAAGTGCAACTTCAAGAATCAGGCGGAGGACTCGTGCAGCCCG |
| | | GAGGATCATTGCGGCTCTCGTGCGCCGCCTCGGGCTTCACCTTCTCGAGCGAC |
| | | GCCATGACCTGGGTCCGCCAGGCCCCGGGGAAGGGGCTGGAATGGGTGTCTGT |
| | | GATTTCCGGCTCCGGGGGAACTACGTACTACGCCGATTCCGTGAAAGGTCGCT |
| | | TCACTATCTCCCGGGACAACAGCAAGAACACCCTTTATCTGCAAATGAATTCC |
| | | CTCCGCGCCGAGGACACCGCCGTGTACTACTGCGCCAAGCTGGACTCCTCGGG |
| | | CTACTACTATGCCCGGGGTCCGAGATACTGGGGACAGGGAACCCTCGTGACCG |
| | | TGTCCTCCGCGTCCGGCGGAGGAGGGTCGGGAGGGCGGGCCTCCGGCGGCGGC |
| | | GGTTCGGACATCCAGCTGACCCAGTCCCCATCCTCACTGAGCGCAAGCGTGGG |
| | | CGACAGAGTCACCATTACATGCAGGGCGTCCCAGAGCATCAGCTCCTACCTGA |
| | | ACTGGTACCAACAGAAGCCTGGAAAGGCTCCTAAGCTGTTGATCTACGGGGCT |
| | | TCGACCCTGGCATCCGGGGTGCCCGCGAGGTTTAGCGGAAGCGGTAGCGGCAC |
| | | TCACTTCACTCTGACCATTAACAGCCTCCAGTCCGAGGATTCAGCCACTTACT |
| | | ACTGTCAGCAGTCCTACAAGCGGGCCAGCTTCGGACAGGGCACTAAGGTCGAG |
| | | ATCAAGACCACTACCCCAGCACCGAGGCCACCCACCCCGGCTCCTACCATCGC |
| | | CTCCCAGCCTCTGTCCCTGCGTCCGGAGGCATGTAGACCCGCAGCTGGTGGGG |
| | | CCGTGCATACCCGGGGTCTTGACTTCGCCTGCGATATCTACATTTGGGCCCCT |
| | | CTGGCTGGTACTTGCGGGGTCCTGCTGCTTTCACTCGTGATCACTCTTTACTG |
| | | TAAGCGCGGTCGGAAGAAGCTGCTGTACATCTTTAAGCAACCCTTCATGAGGC |
| | | CTGTGCAGACTACTCAAGAGGAGGACGGCTGTTCATGCCGGTTCCCAGAGGAG |
| | | GAGGAAGGCGGCTGCGAACTGCGCGTGAAATTCAGCCGCAGCGCAGATGCTCC |
| | | AGCCTACAAGCAGGGGCAGAACCAGCTCTACAACGAACTCAATCTTGGTCGGA |
| | | GAGAGGAGTACGACGTGCTGGACAAGCGGAGAGGACGGGACCCAGAAATGGGC |
| | | GGGAAGCCGCGCAGAAAGAATCCCCAAGAGGGCCTGTACAACGAGCTCCAAAA |
| | | GGATAAGATGGCAGAAGCCTATAGCGAGATTGGTATGAAAGGGGAACGCAGAA |
| | | GAGGCAAAGGCCACGACGGACTGTACCAGGGACTCAGCACCGCCACCAAGGAC |
| | | ACCTATGACGCTCTTCACATGCAGGCCCTGCCGCCTCGG |

139102

| | | |
|---|---|---|
| 139102-aa | 44 | QVQLVQSGAEVKKPGASVKVSCKASGYTFSNYGITWVRQAPGQGLEWMGWISA |
| ScFv domain | | YNGNTNYAQKFQGRVTMTRNTSISTAYMELSSLRSEDTAVYYCARGPYYYYMD |
| | | VWGKGTMVTVSSASGGGGSGGRASGGGGSEIVMTQSPLSLPVTPGEPASISCR |
| | | SSQSLLYSNGYNYVDWYLQKPGQSPQLLIYLGSNRASGVPDRFSGSGSGTDFK |
| | | LQISRVEAEDVGIYYCMQGRQFPYSFGQGTKVEIK |
| 139102-nt | 59 | CAAGTCCAACTGGTCCAGAGCGGTGCAGAAGTGAAGAAGCCCGGAGCGAGCGT |
| ScFv domain | | GAAAGTGTCCTGCAAGGCTTCCGGGTACACCTTCTCCAACTACGGCATCACTT |
| | | GGGTGCGCCAGGCCCCGGGACAGGGCCTGGAATGGATGGGGTGGATTTCCGCG |
| | | TACAACGGCAATACGAACTACGCTCAGAAGTTCCAGGGTAGAGTGACCATGAC |
| | | TAGGAACACCTCCATTTCCACCGCCTACATGGAACTGTCCTCCCTGCGGAGCG |
| | | AGGACACCGCCGTGTACTATTGCGCCCGGGGACCATACTACTACTACATGGAT |
| | | GTCTGGGGGAAGGGGACTATGGTCACCGTGTCATCCGCCTCGGGAGGCGGCGG |
| | | ATCAGGAGGACGCGCCTCTGGTGGTGGAGGATCGGAGATCGTGATGACCCAGA |
| | | GCCCTCTCTCCTTGCCCGTGACTCCTGGGGAGCCCGCATCCATTTCATGCCGG |
| | | AGCTCCCAGTCACTTCTCTACTCCAACGGCTATAACTACGTGGATTGGTACCT |
| | | CCAAAAGCCGGGCCAGAGCCCGCAGCTGCTGATCTACCTGGGCTCGAACAGGG |
| | | CCAGCGGAGTGCCTGACCGGTTCTCCGGGTCGGGAAGCGGGACCGACTTCAAG |
| | | CTGCAAATCTCGAGAGTGGAGGCCGAGGACGTGGGAATCTACTACTGTATGCA |
| | | GGGCCGCCAGTTTCCGTACTCGTTCGGACAGGGCACCAAAGTGGAAATCAAG |
| 139102-aa | 74 | QVQLVQSGAEVKKPGASVKVSCKASGYTFSNYGITWVRQAPGQGLEWMGWISA |
| VH | | YNGNTNYAQKFQGRVTMTRNTSISTAYMELSSLRSEDTAVYYCARGPYYYYMD |
| | | VWGKGTMVTVSS |
| 139102-aa | 89 | EIVMTQSPLSLPVTPGEPASISCRSSQSLLYSNGYNYVDWYLQKPGQSPQLLI |
| VL | | YLGSNRASGVPDRFSGSGSGTDFKLQISRVEAEDVGIYYCMQGRQFPYSFGQG |
| | | TKVEIK |
| 139102-aa | 104 | MALPVTALLLPLALLLHAARPQVQLVQSGAEVKKPGASVKVSCKASGYTFSNY |
| Full CAR | | GITWVRQAPGQGLEWMGWISAYNGNTNYAQKFQGRVTMTRNTSISTAYMELSS |
| | | LRSEDTAVYYCARGPYYYYMDVWGKGTMVTVSSASGGGGSGGRASGGGGSEIV |
| | | MTQSPLSLPVTPGEPASISCRSSQSLLYSNGYNYVDWYLQKPGQSPQLLIYLG |
| | | SNRASGVPDRFSGSGSGTDFKLQISRVEAEDVGIYYCMQGRQFPYSFGQGTKV |
| | | EIKTTTPAPRPPTPAPTIASQPLSLRPEACRPAAGGAVHTRGLDFACDIYIWA |
| | | PLAGTCGVLLLSLVITLYCKRGRKKLLYIFKQPFMRPVQTTQEEDGCSCRFPE |
| | | EEEGGCELRVKFSRSADAPAYKQGQNQLYNELNLGRREEYDVLDKRRGRDPEM |
| | | GGKPRRKNPQEGLYNELQKDKMAEAYSEIGMKGERRRGKGHDGLYQGLSTATK |
| | | DTYDALHMQALPPR |
| 139102-nt | 119 | ATGGCCCTCCCTGTCACCGCCCTGCTGCTTCCGCTGGCTCTTCTGCTCCACGC |
| Full CAR | | CGCTCGGCCCCAAGTCCAACTGGTCCAGAGCGGTGCAGAAGTGAAGAAGCCCG |
| | | GAGCGAGCGTGAAAGTGTCCTGCAAGGCTTCCGGGTACACCTTCTCCAACTAC |
| | | GGCATCACTTGGGTGCGCCAGGCCCCGGGACAGGGCCTGGAATGGATGGGGTG |
| | | GATTTCCGCGTACAACGGCAATACGAACTACGCTCAGAAGTTCCAGGGTAGAG |
| | | TGACCATGACTAGGAACACCTCCATTTCCACCGCCTACATGGAACTGTCCTCC |
| | | CTGCGGAGCGAGGACACCGCCGTGTACTATTGCGCCCGGGGACCATACTACTA |
| | | CTACATGGATGTCTGGGGGAAGGGGACTATGGTCACCGTGTCATCCGCCTCGG |
| | | GAGGCGGCGGATCAGGAGGACGCGCCTCTGGTGGTGGAGGATCGGAGATCGTG |
| | | ATGACCCAGAGCCCTCTCTCCTTGCCCGTGACTCCTGGGGAGCCCGCATCCAT |
| | | TTCATGCCGGAGCTCCCAGTCACTTCTCTACTCCAACGGCTATAACTACGTGG |
| | | ATTGGTACCTCCAAAAGCCGGGCCAGAGCCCGCAGCTGCTGATCTACCTGGGC |
| | | TCGAACAGGGCCAGCGGAGTGCCTGACCGGTTCTCCGGGTCGGGAAGCGGGAC |
| | | CGACTTCAAGCTGCAAATCTCGAGAGTGGAGGCCGAGGACGTGGGAATCTACT |
| | | ACTGTATGCAGGGCCGCCAGTTTCCGTACTCGTTCGGACAGGGCACCAAAGTG |
| | | GAAATCAAGACCACTACCCCAGCACCGAGGCCACCCACCCCGGCTCCTACCAT |
| | | CGCCTCCCAGCCTCTGTCCCTGCGTCCGGAGGCATGTAGACCCGCAGCTGGTG |
| | | GGGCCGTGCATACCCGGGGTCTTGACTTCGCCTGCGATATCTACATTTGGGCC |
| | | CCTCTGGCTGGTACTTGCGGGGTCCTGCTGCTTTCACTCGTGATCACTCTTTA |
| | | CTGTAAGCGCGGTCGGAAGAAGCTGCTGTACATCTTTAAGCAACCCTTCATGA |
| | | GGCCTGTGCAGACTACTCAAGAGGAGGACGGCTGTTCATGCCGGTTCCCAGAG |
| | | GAGGAGGAAGGCGGCTGCGAACTGCGCGTGAAATTCAGCCGCAGCGCAGATGC |
| | | TCCAGCCTACAAGCAGGGGCAGAACCAGCTCTACAACGAACTCAATCTTGGTC |
| | | GGAGAGAGGAGTACGACGTGCTGGACAAGCGGAGAGGACGGGACCCAGAAATG |
| | | GGCGGGAAGCCGCGCAGAAAGAATCCCCAAGAGGGCCTGTACAACGAGCTCCA |
| | | AAAGGATAAGATGGCAGAAGCCTATAGCGAGATTGGTATGAAAGGGGAACGCA |
| | | GAAGAGGCAAAGGCCACGACGGACTGTACCAGGGACTCAGCACCGCCACCAAG |
| | | GACACCTATGACGCTCTTCACATGCAGGCCCTGCCGCCTCGG |

139104

| | | |
|---|---|---|
| 139104-aa | 45 | EVQLLETGGGLVQPGGSLRLSCAVSGFALSNHGMSWVRRAPGKGLEWVSGIVY |
| ScFv domain | | SGSTYYAASVKGRFTISRDNSRNTLYLQMNSLRPEDTAIYYCSAHGGESDVWG |
| | | QGTTVTVSSASGGGGSGGRASGGGGSEIVLTQSPATLSVSPGESATLSCRASQ |
| | | SVSSNLAWYQQKPGQAPRLLIYGASTRASGIPDRFSGSGSGTDFTLTISSLQA |
| | | EDVAVYYCQQYGSSLTFGGGTKVEIK |
| 139104-nt | 60 | GAAGTGCAATTGCTCGAAACTGGAGGAGGTCTGGTGCAACCTGGAGGATCACT |
| ScFv domain | | TCGCCTGTCCTGCGCCGTGTCGGGCTTTGCCCTGTCCAACCATGGAATGAGCT |
| | | GGGTCCGCCGCGCGCCGGGGAAGGGCCTCGAATGGGTGTCCGGCATCGTCTAC |
| | | TCCGGCTCCACCTACTACGCCGCGTCCGTGAAGGGCCGGTTCACGATTTCACG |
| | | GGACAACTCGCGGAACACCCTGTACCTCCAAATGAATTCCCTTCGGCCGGAGG |
| | | ATACTGCCATCTACTACTGCTCCGCCCACGGTGGCGAATCCGACGTCTGGGGC |
| | | CAGGGAACCACCGTGACCGTGTCCAGCGCGTCCGGGGGAGGAGGAAGCGGGGG |
| | | TAGAGCATCGGGTGGAGGCGGATCAGAGATCGTGCTGACCCAGTCCCCCGCCA |
| | | CCTTGAGCGTGTCACCAGGAGAGTCCGCCACCCTGTCATGCCGCGCCAGCCAG |
| | | TCCGTGTCCTCCAACCTGGCTTGGTACCAGCAGAAGCCGGGGCAGGCCCCTAG |
| | | ACTCCTGATCTATGGGGCGTCGACCCGGGCATCTGGAATTCCCGATAGGTTCA |
| | | GCGGATCGGGCTCGGGCACTGACTTCACTCTGACCATCTCCTCGCTGCAAGCC |
| | | GAGGACGTGGCTGTGTACTACTGTCAGCAGTACGGAAGCTCCCTGACTTTCGG |
| | | TGGCGGGACCAAAGTCGAGATTAAG |
| 139104-aa | 75 | EVQLLETGGGLVQPGGSLRLSCAVSGFALSNHGMSWVRRAPGKGLEWVSGIVY |
| VH | | SGSTYYAASVKGRFTISRDNSRNTLYLQMNSLRPEDTAIYYCSAHGGESDVWG |
| | | QGTTVTVSS |
| 139104-aa | 90 | EIVLTQSPATLSVSPGESATLSCRASQSVSSNLAWYQQKPGQAPRLLIYGAST |
| VL | | RASGIPDRFSGSGSGTDFTLTISSLQAEDVAVYYCQQYGSSLTFGGGTKVEIK |
| 139104-aa | 105 | MALPVTALLLPLALLLHAARPEVQLLETGGGLVQPGGSLRLSCAVSGFALSNH |
| Full CAR | | GMSWVRRAPGKGLEWVSGIVYSGSTYYAASVKGRFTISRDNSRNTLYLQMNSL |
| | | RPEDTAIYYCSAHGGESDVWGQGTTVTVSSASGGGGSGGRASGGGGSEIVLTQ |
| | | SPATLSVSPGESATLSCRASQSVSSNLAWYQQKPGQAPRLLIYGASTRASGIP |
| | | DRFSGSGSGTDFTLTISSLQAEDVAVYYCQQYGSSLTFGGGTKVEIKTTTPAP |
| | | RPPTPAPTIASQPLSLRPEACRPAAGGAVHTRGLDFACDIYIWAPLAGTCGVL |
| | | LLSLVITLYCKRGRKKLLYIFKQPFMRPVQTTQEEDGCSCRFPEEEEGGCELR |
| | | VKFSRSADAPAYKQGQNQLYNELNLGRREEYDVLDKRRGRDPEMGGKPRRKNP |
| | | QEGLYNELQKDKMAEAYSEIGMKGERRRGKGHDGLYQGLSTATKDTYDALHMQ |
| | | ALPPR |
| 139104-nt | 120 | ATGGCCCTCCCTGTCACCGCCCTGCTGCTTCCGCTGGCTCTTCTGCTCCACGC |
| Full CAR | | CGCTCGGCCCGAAGTGCAATTGCTCGAAACTGGAGGAGGTCTGGTGCAACCTG |
| | | GAGGATCACTTCGCCTGTCCTGCGCCGTGTCGGGCTTTGCCCTGTCCAACCAT |
| | | GGAATGAGCTGGGTCCGCCGCGCGCCGGGGAAGGGCCTCGAATGGGTGTCCGG |
| | | CATCGTCTACTCCGGCTCCACCTACTACGCCGCGTCCGTGAAGGGCCGGTTCA |
| | | CGATTTCACGGGACAACTCGCGGAACACCCTGTACCTCCAAATGAATTCCCTT |
| | | CGGCCGGAGGATACTGCCATCTACTACTGCTCCGCCCACGGTGGCGAATCCGA |
| | | CGTCTGGGGCCAGGGAACCACCGTGACCGTGTCCAGCGCGTCCGGGGGAGGAG |
| | | GAAGCGGGGGTAGAGCATCGGGTGGAGGCGGATCAGAGATCGTGCTGACCCAG |
| | | TCCCCCGCCACCTTGAGCGTGTCACCAGGAGAGTCCGCCACCCTGTCATGCCG |
| | | CGCCAGCCAGTCCGTGTCCTCCAACCTGGCTTGGTACCAGCAGAAGCCGGGGC |
| | | AGGCCCCTAGACTCCTGATCTATGGGGCGTCGACCCGGGCATCTGGAATTCCC |
| | | GATAGGTTCAGCGGATCGGGCTCGGGCACTGACTTCACTCTGACCATCTCCTC |
| | | GCTGCAAGCCGAGGACGTGGCTGTGTACTACTGTCAGCAGTACGGAAGCTCCC |
| | | TGACTTTCGGTGGCGGGACCAAAGTCGAGATTAAGACCACTACCCCAGCACCG |
| | | AGGCCACCCACCCCGGCTCCTACCATCGCCTCCCAGCCTCTGTCCCTGCGTCC |
| | | GGAGGCATGTAGACCCGCAGCTGGTGGGGCCGTGCATACCCGGGGTCTTGACT |
| | | TCGCCTGCGATATCTACATTTGGGCCCCTCTGGCTGGTACTTGCGGGGTCCTG |
| | | CTGCTTTCACTCGTGATCACTCTTTACTGTAAGCGCGGTCGGAAGAAGCTGCT |
| | | GTACATCTTTAAGCAACCCTTCATGAGGCCTGTGCAGACTACTCAAGAGGAGG |
| | | ACGGCTGTTCATGCCGGTTCCCAGAGGAGGAGGAAGGCGGCTGCGAACTGCGC |
| | | GTGAAATTCAGCCGCAGCGCAGATGCTCCAGCCTACAAGCAGGGGCAGAACCA |
| | | GCTCTACAACGAACTCAATCTTGGTCGGAGAGAGGAGTACGACGTGCTGGACA |
| | | AGCGGAGAGGACGGGACCCAGAAATGGGCGGGAAGCCGCGCAGAAAGAATCCC |
| | | CAAGAGGGCCTGTACAACGAGCTCCAAAAGGATAAGATGGCAGAAGCCTATAG |
| | | CGAGATTGGTATGAAAGGGGAACGCAGAAGAGGCAAAGGCCACGACGGACTGT |
| | | ACCAGGGACTCAGCACCGCCACCAAGGACACCTATGACGCTCTTCACATGCAG |
| | | GCCCTGCCGCCTCGG |

139106

| | | |
|---|---|---|
| 139106-aa | 46 | EVQLVETGGGLVQPGGSLRLSCAVSGFALSNHGMSWVRRAPGKGLEWVSGIVY |
| ScFv domain | | SGSTYYAASVKGRFTISRDNSRNTLYLQMNSLRPEDTAIYYCSAHGGESDVWG |
| | | QGTTVTVSSASGGGGSGGRASGGGGSEIVMTQSPATLSVSPGERATLSCRASQ |
| | | SVSSKLAWYQQKPGQAPRLLMYGASIRATGIPDRFSGSGSGTEFTLTISSLEP |
| | | EDFAVYYCQQYGSSSWTFGQGTKVEIK |
| 139106-nt | 61 | GAAGTGCAATTGGTGGAAACTGGAGGAGGACTTGTGCAACCTGGAGGATCATT |
| ScFv domain | | GAGACTGAGCTGCGCAGTGTCGGGATTCGCCCTGAGCAACCATGGAATGTCCT |
| | | GGGTCAGAAGGGCCCCTGGAAAAGGCCTCGAATGGGTGTCAGGGATCGTGTAC |
| | | TCCGGTTCCACTTACTACGCCGCCTCCGTGAAGGGGCGCTTCACTATCTCACG |
| | | GGATAACTCCCGCAATACCCTGTACCTCCAAATGAACAGCCTGCGGCCGGAGG |
| | | ATACCGCCATCTACTACTGTTCCGCCCACGGTGGAGAGTCTGACGTCTGGGGC |
| | | CAGGGAACTACCGTGACCGTGTCCTCCGCGTCCGGCGGTGGAGGGAGCGGCGG |
| | | CCGCGCCAGCGGCGGCGGAGGCTCCGAGATCGTGATGACCCAGAGCCCCGCTA |
| | | CTCTGTCGGTGTCGCCCGGAGAAAGGGCGACCCTGTCCTGCCGGGCGTCGCAG |
| | | TCCGTGAGCAGCAAGCTGGCTTGGTACCAGCAGAAGCCGGGCCAGGCACCACG |
| | | CCTGCTTATGTACGGTGCCTCCATTCGGGCCACCGGAATCCCGGACCGGTTCT |
| | | CGGGGTCGGGGTCCGGTACCGAGTTCACACTGACCATTTCCTCGCTCGAGCCC |
| | | GAGGACTTTGCCGTCTATTACTGCCAGCAGTACGGCTCCTCCTCATGGACGTT |
| | | CGGCCAGGGGACCAAGGTCGAAATCAAG |
| 139106-aa | 76 | EVQLVETGGGLVQPGGSLRLSCAVSGFALSNHGMSWVRRAPGKGLEWVSGIVY |
| VH | | SGSTYYAASVKGRFTISRDNSRNTLYLQMNSLRPEDTAIYYCSAHGGESDVWG |
| | | QGTTVTVSS |
| 139106-aa | 91 | EIVMTQSPATLSVSPGERATLSCRASQSVSSKLAWYQQKPGQAPRLLMYGASI |
| VL | | RATGIPDRFSGSGSGTEFTLTISSLEPEDFAVYYCQQYGSSSWTFGQGTKVEI |
| | | K |
| 139106-aa | 106 | MALPVTALLLPLALLLHAARPEVQLVETGGGLVQPGGSLRLSCAVSGFALSNH |
| Full CAR | | GMSWVRRAPGKGLEWVSGIVYSGSTYYAASVKGRFTISRDNSRNTLYLQMNSL |
| | | RPEDTAIYYCSAHGGESDVWGQGTTVTVSSASGGGGSGGRASGGGGSEIVMTQ |
| | | SPATLSVSPGERATLSCRASQSVSSKLAWYQQKPGQAPRLLMYGASIRATGIP |
| | | DRFSGSGSGTEFTLTISSLEPEDFAVYYCQQYGSSSWTFGQGTKVEIKTTTPA |
| | | PRPPTPAPTIASQPLSLRPEACRPAAGGAVHTRGLDFACDIYIWAPLAGTCGV |
| | | LLLSLVITLYCKRGRKKLLYIFKQPFMRPVQTTQEEDGCSCRFPEEEEGGCEL |
| | | RVKFSRSADAPAYKQGQNQLYNELNLGRREEYDVLDKRRGRDPEMGGKPRRKN |
| | | PQEGLYNELQKDKMAEAYSEIGMKGERRRGKGHDGLYQGLSTATKDTYDALHM |
| | | QALPPR |
| 139106-nt | 121 | ATGGCCCTCCCTGTCACCGCCCTGCTGCTTCCGCTGGCTCTTCTGCTCCACGC |
| Full CAR | | CGCTCGGCCCGAAGTGCAATTGGTGGAAACTGGAGGAGGACTTGTGCAACCTG |
| | | GAGGATCATTGAGACTGAGCTGCGCAGTGTCGGGATTCGCCCTGAGCAACCAT |
| | | GGAATGTCCTGGGTCAGAAGGGCCCCTGGAAAAGGCCTCGAATGGGTGTCAGG |
| | | GATCGTGTACTCCGGTTCCACTTACTACGCCGCCTCCGTGAAGGGGCGCTTCA |
| | | CTATCTCACGGGATAACTCCCGCAATACCCTGTACCTCCAAATGAACAGCCTG |
| | | CGGCCGGAGGATACCGCCATCTACTACTGTTCCGCCCACGGTGGAGAGTCTGA |
| | | CGTCTGGGGCCAGGGAACTACCGTGACCGTGTCCTCCGCGTCCGGCGGTGGAG |
| | | GGAGCGGCGGCCGCGCCAGCGGCGGCGGAGGCTCCGAGATCGTGATGACCCAG |
| | | AGCCCCGCTACTCTGTCGGTGTCGCCCGGAGAAAGGGCGACCCTGTCCTGCCG |
| | | GGCGTCGCAGTCCGTGAGCAGCAAGCTGGCTTGGTACCAGCAGAAGCCGGGCC |
| | | AGGCACCACGCCTGCTTATGTACGGTGCCTCCATTCGGGCCACCGGAATCCCG |
| | | GACCGGTTCTCGGGGTCGGGGTCCGGTACCGAGTTCACACTGACCATTTCCTC |
| | | GCTCGAGCCCGAGGACTTTGCCGTCTATTACTGCCAGCAGTACGGCTCCTCCT |
| | | CATGGACGTTCGGCCAGGGGACCAAGGTCGAAATCAAGACCACTACCCCAGCA |
| | | CCGAGGCCACCCACCCCGGCTCCTACCATCGCCTCCCAGCCTCTGTCCCTGCG |
| | | TCCGGAGGCATGTAGACCCGCAGCTGGTGGGGCCGTGCATACCCGGGGTCTTG |
| | | ACTTCGCCTGCGATATCTACATTTGGGCCCCTCTGGCTGGTACTTGCGGGGTC |
| | | CTGCTGCTTTCACTCGTGATCACTCTTTACTGTAAGCGCGGTCGGAAGAAGCT |
| | | GCTGTACATCTTTAAGCAACCCTTCATGAGGCCTGTGCAGACTACTCAAGAGG |
| | | AGGACGGCTGTTCATGCCGGTTCCCAGAGGAGGAGGAAGGCGGCTGCGAACTG |
| | | CGCGTGAAATTCAGCCGCAGCGCAGATGCTCCAGCCTACAAGCAGGGGCAGAA |
| | | CCAGCTCTACAACGAACTCAATCTTGGTCGGAGAGAGGAGTACGACGTGCTGG |
| | | ACAAGCGGAGAGGACGGGACCCAGAAATGGGCGGGAAGCCGCGCAGAAAGAAT |
| | | CCCCAAGAGGGCCTGTACAACGAGCTCCAAAAGGATAAGATGGCAGAAGCCTA |
| | | TAGCGAGATTGGTATGAAAGGGGAACGCAGAAGAGGCAAAGGCCACGACGGAC |
| | | TGTACCAGGGACTCAGCACCGCCACCAAGGACACCTATGACGCTCTTCACATG |
| | | CAGGCCCTGCCGCCTCGG |

139107

| | | |
|---|---|---|
| 139107-aa | 47 | EVQLVETGGGVVQPGGSLRLSCAVSGFALSNHGMSWVRRAPGKGLEWVSGIVY |
| ScFv domain | | SGSTYYAASVKGRFTISRDNSRNTLYLQMNSLRPEDTAIYYCSAHGGESDVWG |
| | | QGTTVTVSSASGGGGSGGRASGGGGSEIVLTQSPGTLSLSPGERATLSCRASQ |
| | | SVGSTNLAWYQQKPGQAPRLLIYDASNRATGIPDRFSGGGSGTDFTLTISRLE |
| | | PEDFAVYYCQQYGSSPPWTFGQGTKVEIK |
| 139107-nt | 62 | GAAGTGCAATTGGTGGAGACTGGAGGAGGAGTGGTGCAACCTGGAGGAAGCCT |
| ScFv domain | | GAGACTGTCATGCGCGGTGTCGGGCTTCGCCCTCTCCAACCACGGAATGTCCT |
| | | GGGTCCGCCGGGCCCCTGGGAAAGGACTTGAATGGGTGTCCGGCATCGTGTAC |
| | | TCGGGTTCCACCTACTACGCGGCCTCAGTGAAGGGCCGGTTTACTATTAGCCG |
| | | CGACAACTCCAGAAACACACTGTACCTCCAAATGAACTCGCTGCGGCCGGAAG |
| | | ATACCGCTATCTACTACTGCTCCGCCCATGGGGGAGAGTCGGACGTCTGGGGA |
| | | CAGGGCACCACTGTCACTGTGTCCAGCGCTTCCGGCGGTGGTGGAAGCGGGGG |
| | | ACGGGCCTCAGGAGGCGGTGGCAGCGAGATTGTGCTGACCCAGTCCCCCGGGA |
| | | CCCTGAGCCTGTCCCCGGGAGAAAGGGCCACCCTCTCCTGTCGGGCATCCCAG |
| | | TCCGTGGGGTCTACTAACCTTGCATGGTACCAGCAGAAGCCCGGCCAGGCCCC |
| | | TCGCCTGCTGATCTACGACGCGTCCAATAGAGCCACCGGCATCCCGGATCGCT |
| | | TCAGCGGAGGCGGATCGGGCACCGACTTCACCCTCACCATTTCAAGGCTGGAA |
| | | CCGGAGGACTTCGCCGTGTACTACTGCCAGCAGTATGGTTCGTCCCCACCCTG |
| | | GACGTTCGGCCAGGGGACTAAGGTCGAGATCAAG |
| 139107-aa | 77 | EVQLVETGGGVVQPGGSLRLSCAVSGFALSNHGMSWVRRAPGKGLEWVSGIVY |
| VH | | SGSTYYAASVKGRFTISRDNSRNTLYLQMNSLRPEDTAIYYCSAHGGESDVWG |
| | | QGTTVTVSS |
| 139107-aa | 92 | EIVLTQSPGTLSLSPGERATLSCRASQSVGSTNLAWYQQKPGQAPRLLIYDAS |
| VL | | NRATGIPDRFSGGGSGTDFTLTISRLEPEDFAVYYCQQYGSSPPWTFGQGTKV |
| | | EIK |
| 139107-aa | 107 | MALPVTALLLPLALLLHAARPEVQLVETGGGVVQPGGSLRLSCAVSGFALSNH |
| Full CAR | | GMSWVRRAPGKGLEWVSGIVYSGSTYYAASVKGRFTISRDNSRNTLYLQMNSL |
| | | RPEDTAIYYCSAHGGESDVWGQGTTVTVSSASGGGGSGGRASGGGGSEIVLTQ |
| | | SPGTLSLSPGERATLSCRASQSVGSTNLAWYQQKPGQAPRLLIYDASNRATGI |
| | | PDRFSGGGSGTDFTLTISRLEPEDFAVYYCQQYGSSPPWTFGQGTKVEIKTTT |
| | | PAPRPPTPAPTIASQPLSLRPEACRPAAGGAVHTRGLDFACDIYIWAPLAGTC |
| | | GVLLLSLVITLYCKRGRKKLLYIFKQPFMRPVQTTQEEDGCSCRFPEEEEGGC |
| | | ELRVKFSRSADAPAYKQGQNQLYNELNLGRREEYDVLDKRRGRDPEMGGKPRR |
| | | KNPQEGLYNELQKDKMAEAYSEIGMKGERRRGKGHDGLYQGLSTATKDTYDAL |
| | | HMQALPPR |
| 139107-nt | 122 | ATGGCCCTCCCTGTCACCGCCCTGCTGCTTCCGCTGGCTCTTCTGCTCCACGC |
| Full CAR | | CGCTCGGCCCGAAGTGCAATTGGTGGAGACTGGAGGAGGAGTGGTGCAACCTG |
| | | GAGGAAGCCTGAGACTGTCATGCGCGGTGTCGGGCTTCGCCCTCTCCAACCAC |
| | | GGAATGTCCTGGGTCCGCCGGGCCCCTGGGAAAGGACTTGAATGGGTGTCCGG |
| | | CATCGTGTACTCGGGTTCCACCTACTACGCGGCCTCAGTGAAGGGCCGGTTTA |
| | | CTATTAGCCGCGACAACTCCAGAAACACACTGTACCTCCAAATGAACTCGCTG |
| | | CGGCCGGAAGATACCGCTATCTACTACTGCTCCGCCCATGGGGGAGAGTCGGA |
| | | CGTCTGGGGACAGGGCACCACTGTCACTGTGTCCAGCGCTTCCGGCGGTGGTG |
| | | GAAGCGGGGGACGGGCCTCAGGAGGCGGTGGCAGCGAGATTGTGCTGACCCAG |
| | | TCCCCCGGGACCCTGAGCCTGTCCCCGGGAGAAAGGGCCACCCTCTCCTGTCG |
| | | GGCATCCCAGTCCGTGGGGTCTACTAACCTTGCATGGTACCAGCAGAAGCCCG |
| | | GCCAGGCCCCTCGCCTGCTGATCTACGACGCGTCCAATAGAGCCACCGGCATC |
| | | CCGGATCGCTTCAGCGGAGGCGGATCGGGCACCGACTTCACCCTCACCATTTC |
| | | AAGGCTGGAACCGGAGGACTTCGCCGTGTACTACTGCCAGCAGTATGGTTCGT |
| | | CCCCACCCTGGACGTTCGGCCAGGGGACTAAGGTCGAGATCAAGACCACTACC |
| | | CCAGCACCGAGGCCACCCACCCCGGCTCCTACCATCGCCTCCCAGCCTCTGTC |
| | | CCTGCGTCCGGAGGCATGTAGACCCGCAGCTGGTGGGGCCGTGCATACCCGGG |
| | | GTCTTGACTTCGCCTGCGATATCTACATTTGGGCCCCTCTGGCTGGTACTTGC |
| | | GGGGTCCTGCTGCTTTCACTCGTGATCACTCTTTACTGTAAGCGCGGTCGGAA |
| | | GAAGCTGCTGTACATCTTTAAGCAACCCTTCATGAGGCCTGTGCAGACTACTC |
| | | AAGAGGAGGACGGCTGTTCATGCCGGTTCCCAGAGGAGGAGGAAGGCGGCTGC |
| | | GAACTGCGCGTGAAATTCAGCCGCAGCGCAGATGCTCCAGCCTACAAGCAGGG |
| | | GCAGAACCAGCTCTACAACGAACTCAATCTTGGTCGGAGAGAGGAGTACGACG |
| | | TGCTGGACAAGCGGAGAGGACGGGACCCAGAAATGGGCGGGAAGCCGCGCAGA |
| | | AAGAATCCCCAAGAGGGCCTGTACAACGAGCTCCAAAAGGATAAGATGGCAGA |
| | | AGCCTATAGCGAGATTGGTATGAAAGGGGAACGCAGAAGAGGCAAAGGCCACG |
| | | ACGGACTGTACCAGGGACTCAGCACCGCCACCAAGGACACCTATGACGCTCTT |
| | | CACATGCAGGCCCTGCCGCCTCGG |

139108

| | | |
|---|---|---|
| 139108-aa | 48 | QVQLVESGGGLVKPGGSLRLSCAASGFTFSDYYMSWIRQAPGKGLEWVSYISS |
| ScFv domain | | SGSTIYYADSVKGRFTISRDNAKNSLYLQMNSLRAEDTAVYYCARESGDGMDV |
| | | WGQGTTVTVSSASGGGGSGGRASGGGGSDIQMTQSPSSLSASVGDRVTITCRA |
| | | SQSISSYLNWYQQKPGKAPKLLIYAASSLQSGVPSRFSGSGSGTDFTLTISSL |
| | | QPEDFATYYCQQSYTLAFGQGTKVDIK |
| 139108-nt | 63 | CAAGTGCAACTCGTGGAATCTGGTGGAGGACTCGTGAAACCTGGAGGATCATT |
| ScFv domain | | GAGACTGTCATGCGCGGCCTCGGGATTCACGTTCTCCGATTACTACATGAGCT |
| | | GGATTCGCCAGGCTCCGGGGAAGGGACTGGAATGGGTGTCCTACATTTCCTCA |
| | | TCCGGCTCCACCATCTACTACGCGGACTCCGTGAAGGGGAGATTCACCATTAG |
| | | CCGCGATAACGCCAAGAACAGCCTGTACCTTCAGATGAACTCCCTGCGGGCTG |
| | | AAGATACTGCCGTCTACTACTGCGCAAGGGAGAGCGGAGATGGGATGGACGTC |
| | | TGGGGACAGGGTACCACTGTGACCGTGTCGTCGGCCTCCGGCGGAGGGGGTTC |
| | | GGGTGGAAGGGCCAGCGGCGGCGGAGGCAGCGACATCCAGATGACCCAGTCCC |
| | | CCTCATCGCTGTCCGCCTCCGTGGGCGACCGCGTCACCATCACATGCCGGGCC |
| | | TCACAGTCGATCTCCTCCTACCTCAATTGGTATCAGCAGAAGCCCGGAAAGGC |
| | | CCCTAAGCTTCTGATCTACGCAGCGTCCTCCCTGCAATCCGGGGTCCCATCTC |
| | | GGTTCTCCGGCTCGGGCAGCGGTACCGACTTCACTCTGACCATCTCGAGCCTG |
| | | CAGCCGGAGGACTTCGCCACTTACTACTGTCAGCAAAGCTACACCCTCGCGTT |
| | | TGGCCAGGGCACCAAAGTGGACATCAAG |
| 139108-aa | 78 | QVQLVESGGGLVKPGGSLRLSCAASGFTFSDYYMSWIRQAPGKGLEWVSYISS |
| VH | | SGSTIYYADSVKGRFTISRDNAKNSLYLQMNSLRAEDTAVYYCARESGDGMDV |
| | | WGQGTTVTVSS |
| 139108-aa | 93 | DIQMTQSPSSLSASVGDRVTITCRASQSISSYLNWYQQKPGKAPKLLIYAASS |
| VL | | LQSGVPSRFSGSGSGTDFTLTISSLQPEDFATYYCQQSYTLAFGQGTKVDIK |
| 139108-aa | 108 | MALPVTALLLPLALLLHAARPQVQLVESGGGLVKPGGSLRLSCAASGFTFSDY |
| Full CAR | | YMSWIRQAPGKGLEWVSYISSSGSTIYYADSVKGRFTISRDNAKNSLYLQMNS |
| | | LRAEDTAVYYCARESGDGMDVWGQGTTVTVSSASGGGGSGGRASGGGGSDIQM |
| | | TQSPSSLSASVGDRVTITCRASQSISSYLNWYQQKPGKAPKLLIYAASSLQSG |
| | | VPSRFSGSGSGTDFTLTISSLQPEDFATYYCQQSYTLAFGQGTKVDIKTTTPA |
| | | PRPPTPAPTIASQPLSLRPEACRPAAGGAVHTRGLDFACDIYIWAPLAGTCGV |
| | | LLLSLVITLYCKRGRKKLLYIFKQPFMRPVQTTQEEDGCSCRFPEEEEGGCEL |
| | | RVKFSRSADAPAYKQGQNQLYNELNLGRREEYDVLDKRRGRDPEMGGKPRRKN |
| | | PQEGLYNELQKDKMAEAYSEIGMKGERRRGKGHDGLYQGLSTATKDTYDALHM |
| | | QALPPR |
| 139108-nt | 123 | ATGGCCCTCCCTGTCACCGCCCTGCTGCTTCCGCTGGCTCTTCTGCTCCACGC |
| Full CAR | | CGCTCGGCCCCAAGTGCAACTCGTGGAATCTGGTGGAGGACTCGTGAAACCTG |
| | | GAGGATCATTGAGACTGTCATGCGCGGCCTCGGGATTCACGTTCTCCGATTAC |
| | | TACATGAGCTGGATTCGCCAGGCTCCGGGGAAGGGACTGGAATGGGTGTCCTA |
| | | CATTTCCTCATCCGGCTCCACCATCTACTACGCGGACTCCGTGAAGGGGAGAT |
| | | TCACCATTAGCCGCGATAACGCCAAGAACAGCCTGTACCTTCAGATGAACTCC |
| | | CTGCGGGCTGAAGATACTGCCGTCTACTACTGCGCAAGGGAGAGCGGAGATGG |
| | | GATGGACGTCTGGGGACAGGGTACCACTGTGACCGTGTCGTCGGCCTCCGGCG |
| | | GAGGGGGTTCGGGTGGAAGGGCCAGCGGCGGCGGAGGCAGCGACATCCAGATG |
| | | ACCCAGTCCCCCTCATCGCTGTCCGCCTCCGTGGGCGACCGCGTCACCATCAC |
| | | ATGCCGGGCCTCACAGTCGATCTCCTCCTACCTCAATTGGTATCAGCAGAAGC |
| | | CCGGAAAGGCCCCTAAGCTTCTGATCTACGCAGCGTCCTCCCTGCAATCCGGG |
| | | GTCCCATCTCGGTTCTCCGGCTCGGGCAGCGGTACCGACTTCACTCTGACCAT |
| | | CTCGAGCCTGCAGCCGGAGGACTTCGCCACTTACTACTGTCAGCAAAGCTACA |
| | | CCCTCGCGTTTGGCCAGGGCACCAAAGTGGACATCAAGACCACTACCCCAGCA |
| | | CCGAGGCCACCCACCCCGGCTCCTACCATCGCCTCCCAGCCTCTGTCCCTGCG |
| | | TCCGGAGGCATGTAGACCCGCAGCTGGTGGGGCCGTGCATACCCGGGGTCTTG |
| | | ACTTCGCCTGCGATATCTACATTTGGGCCCCTCTGGCTGGTACTTGCGGGGTC |
| | | CTGCTGCTTTCACTCGTGATCACTCTTTACTGTAAGCGCGGTCGGAAGAAGCT |
| | | GCTGTACATCTTTAAGCAACCCTTCATGAGGCCTGTGCAGACTACTCAAGAGG |
| | | AGGACGGCTGTTCATGCCGGTTCCCAGAGGAGGAGGAAGGCGGCTGCGAACTG |
| | | CGCGTGAAATTCAGCCGCAGCGCAGATGCTCCAGCCTACAAGCAGGGGCAGAA |
| | | CCAGCTCTACAACGAACTCAATCTTGGTCGGAGAGAGGAGTACGACGTGCTGG |
| | | ACAAGCGGAGAGGACGGGACCCAGAAATGGGCGGGAAGCCGCGCAGAAAGAAT |
| | | CCCCAAGAGGGCCTGTACAACGAGCTCCAAAAGGATAAGATGGCAGAAGCCTA |
| | | TAGCGAGATTGGTATGAAAGGGGAACGCAGAAGAGGCAAAGGCCACGACGGAC |
| | | TGTACCAGGGACTCAGCACCGCCACCAAGGACACCTATGACGCTCTTCACATG |
| | | CAGGCCCTGCCGCCTCGG |

139110

| | | |
|---|---|---|
| 139110-aa | 50 | QVQLVQSGGGLVKPGGSLRLSCAASGFTFSDYYMSWIRQAPGKGLEWVSYISS |
| ScFv domain | | SGNTIYYADSVKGRFTISRDNAKNSLYLQMNSLRAEDTAVYYCARSTMVREDY |
| | | WGQGTLVTVSSASGGGGSGGRASGGGGSDIVLTQSPLSLPVTLGQPASISCKS |
| | | SESLVHNSGKTYLNWFHQRPGQSPRRLIYEVSNRDSGVPDRFTGSGSGTDFTL |
| | | KISRVEAEDVGVYYCMQGTHWPGTFGQGTKLEIK |
| 139110-nt | 65 | CAAGTGCAACTGGTGCAAAGCGGAGGAGGATTGGTCAAACCCGGAGGAAGCCT |
| ScFv domain | | GAGACTGTCATGCGCGGCCTCTGGATTCACCTTCTCCGATTACTACATGTCAT |
| | | GGATCAGACAGGCCCCGGGGAAGGGCCTCGAATGGGTGTCCTACATCTCGTCC |
| | | TCCGGGAACACCATCTACTACGCCGACAGCGTGAAGGGCCGCTTTACCATTTC |
| | | CCGCGACAACGCAAAGAACTCGCTGTACCTTCAGATGAATTCCCTGCGGGCTG |
| | | AAGATACCGCGGTGTACTATTGCGCCCGGTCCACTATGGTCCGGGAGGACTAC |
| | | TGGGGACAGGGCACACTCGTGACCGTGTCCAGCGCGAGCGGGGGTGGAGGCAG |
| | | CGGTGGACGCGCCTCCGGCGGCGGCGGTTCAGACATCGTGCTGACTCAGTCGC |
| | | CCCTGTCGCTGCCGGTCACCCTGGGCCAACCGGCCTCAATTAGCTGCAAGTCC |
| | | TCGGAGAGCCTGGTGCACAACTCAGGAAAGACTTACCTGAACTGGTTCCATCA |
| | | GCGGCCTGGACAGTCCCCACGGAGGCTCATCTATGAAGTGTCCAACAGGGATT |
| | | CGGGGGTGCCCGACCGCTTCACTGGCTCCGGGTCCGGCACCGACTTCACCTTG |
| | | AAAATCTCCAGAGTGGAAGCCGAGGACGTGGGCGTGTACTACTGTATGCAGGG |
| | | TACCCACTGGCCTGGAACCTTTGGACAAGGAACTAAGCTCGAGATTAAG |
| 139110-aa | 80 | QVQLVQSGGGLVKPGGSLRLSCAASGFTFSDYYMSWIRQAPGKGLEWVSYISS |
| VH | | SGNTIYYADSVKGRFTISRDNAKNSLYLQMNSLRAEDTAVYYCARSTMVREDY |
| | | WGQGTLVTVSS |
| 139110-aa | 95 | DIVLTQSPLSLPVTLGQPASISCKSSESLVHNSGKTYLNWFHQRPGQSPRRLI |
| VL | | YEVSNRDSGVPDRFTGSGSGTDFTLKISRVEAEDVGVYYCMQGTHWPGTFGQG |
| | | TKLEIK |
| 139110-aa | 110 | MALPVTALLLPLALLLHAARPQVQLVQSGGGLVKPGGSLRLSCAASGFTFSDY |
| Full CAR | | YMSWIRQAPGKGLEWVSYISSSGNTIYYADSVKGRFTISRDNAKNSLYLQMNS |
| | | LRAEDTAVYYCARSTMVREDYWGQGTLVTVSSASGGGGSGGRASGGGGSDIVL |
| | | TQSPLSLPVTLGQPASISCKSSESLVHNSGKTYLNWFHQRPGQSPRRLIYEVS |
| | | NRDSGVPDRFTGSGSGTDFTLKISRVEAEDVGVYYCMQGTHWPGTFGQGTKLE |
| | | IKTTTPAPRPPTPAPTIASQPLSLRPEACRPAAGGAVHTRGLDFACDIYIWAP |
| | | LAGTCGVLLLSLVITLYCKRGRKKLLYIFKQPFMRPVQTTQEEDGCSCRFPEE |
| | | EEGGCELRVKFSRSADAPAYKQGQNQLYNELNLGRREEYDVLDKRRGRDPEMG |
| | | GKPRRKNPQEGLYNELQKDKMAEAYSEIGMKGERRRGKGHDGLYQGLSTATKD |
| | | TYDALHMQALPPR |
| 139110-nt | 125 | ATGGCCCTCCCTGTCACCGCCCTGCTGCTTCCGCTGGCTCTTCTGCTCCACGC |
| Full CAR | | CGCTCGGCCCCAAGTGCAACTGGTGCAAAGCGGAGGAGGATTGGTCAAACCCG |
| | | GAGGAAGCCTGAGACTGTCATGCGCGGCCTCTGGATTCACCTTCTCCGATTAC |
| | | TACATGTCATGGATCAGACAGGCCCCGGGGAAGGGCCTCGAATGGGTGTCCTA |
| | | CATCTCGTCCTCCGGGAACACCATCTACTACGCCGACAGCGTGAAGGGCCGCT |
| | | TTACCATTTCCCGCGACAACGCAAAGAACTCGCTGTACCTTCAGATGAATTCC |
| | | CTGCGGGCTGAAGATACCGCGGTGTACTATTGCGCCCGGTCCACTATGGTCCG |
| | | GGAGGACTACTGGGGACAGGGCACACTCGTGACCGTGTCCAGCGCGAGCGGGG |
| | | GTGGAGGCAGCGGTGGACGCGCCTCCGGCGGCGGCGGTTCAGACATCGTGCTG |
| | | ACTCAGTCGCCCCTGTCGCTGCCGGTCACCCTGGGCCAACCGGCCTCAATTAG |
| | | CTGCAAGTCCTCGGAGAGCCTGGTGCACAACTCAGGAAAGACTTACCTGAACT |
| | | GGTTCCATCAGCGGCCTGGACAGTCCCCACGGAGGCTCATCTATGAAGTGTCC |
| | | AACAGGGATTCGGGGGTGCCCGACCGCTTCACTGGCTCCGGGTCCGGCACCGA |
| | | CTTCACCTTGAAAATCTCCAGAGTGGAAGCCGAGGACGTGGGCGTGTACTACT |
| | | GTATGCAGGGTACCCACTGGCCTGGAACCTTTGGACAAGGAACTAAGCTCGAG |
| | | ATTAAGACCACTACCCCAGCACCGAGGCCACCCACCCCGGCTCCTACCATCGC |
| | | CTCCCAGCCTCTGTCCCTGCGTCCGGAGGCATGTAGACCCGCAGCTGGTGGGG |
| | | CCGTGCATACCCGGGGTCTTGACTTCGCCTGCGATATCTACATTTGGGCCCCT |
| | | CTGGCTGGTACTTGCGGGGTCCTGCTGCTTTCACTCGTGATCACTCTTTACTG |
| | | TAAGCGCGGTCGGAAGAAGCTGCTGTACATCTTTAAGCAACCCTTCATGAGGC |
| | | CTGTGCAGACTACTCAAGAGGAGGACGGCTGTTCATGCCGGTTCCCAGAGGAG |
| | | GAGGAAGGCGGCTGCGAACTGCGCGTGAAATTCAGCCGCAGCGCAGATGCTCC |
| | | AGCCTACAAGCAGGGGCAGAACCAGCTCTACAACGAACTCAATCTTGGTCGGA |
| | | GAGAGGAGTACGACGTGCTGGACAAGCGGAGAGGACGGGACCCAGAAATGGGC |
| | | GGGAAGCCGCGCAGAAAGAATCCCCAAGAGGGCCTGTACAACGAGCTCCAAAA |
| | | GGATAAGATGGCAGAAGCCTATAGCGAGATTGGTATGAAAGGGGAACGCAGAA |
| | | GAGGCAAAGGCCACGACGGACTGTACCAGGGACTCAGCACCGCCACCAAGGAC |
| | | ACCTATGACGCTCTTCACATGCAGGCCCTGCCGCCTCGG |

139112

| | | |
|---|---|---|
| 139112-aa | 51 | QVQLVESGGGLVQPGGSLRLSCAVSGFALSNHGMSWVRRAPGKGLEWVSGIVY |
| ScFv domain | | SGSTYYAASVKGRFTISRDNSRNTLYLQMNSLRPEDTAIYYCSAHGGESDVWG |
| | | QGTTVTVSSASGGGGSGGRASGGGGSDIRLTQSPSPLSASVGDRVTITCQASE |
| | | DINKFLNWYHQTPGKAPKLLIYDASTLQTGVPSRFSGSGSGTDFTLTINSLQP |
| | | EDIGTYYCQQYESLPLTFGGGTKVEIK |
| 139112-nt | 66 | CAAGTGCAACTCGTGGAATCTGGTGGAGGACTCGTGCAACCCGGTGGAAGCCT |
| ScFv domain | | TAGGCTGTCGTGCGCCGTCAGCGGGTTTGCTCTGAGCAACCATGGAATGTCCT |
| | | GGGTCCGCCGGGCACCGGGAAAAGGGCTGGAATGGGTGTCCGGCATCGTGTAC |
| | | AGCGGGTCAACCTATTACGCCGCGTCCGTGAAGGGCAGATTCACTATCTCAAG |
| | | AGACAACAGCCGGAACACCCTGTACTTGCAAATGAATTCCCTGCGCCCCGAGG |
| | | ACACCGCCATCTACTACTGCTCCGCCCACGGAGGAGAGTCGGACGTGTGGGGC |
| | | CAGGGAACGACTGTGACTGTGTCCAGCGCATCAGGAGGGGGTGGTTCGGGCGG |
| | | CCGGGCCTCGGGGGGAGGAGGTTCCGACATTCGGCTGACCCAGTCCCCGTCCC |
| | | CACTGTCGGCCTCCGTCGGCGACCGCGTGACCATCACTTGTCAGGCGTCCGAG |
| | | GACATTAACAAGTTCCTGAACTGGTACCACCAGACCCCTGGAAAGGCCCCCAA |
| | | GCTGCTGATCTACGATGCCTCGACCCTTCAAACTGGAGTGCCTAGCCGGTTCT |
| | | CCGGGTCCGGCTCCGGCACTGATTTCACTCTGACCATCAACTCATTGCAGCCG |
| | | GAAGATATCGGGACCTACTATTGCCAGCAGTACGAATCCCTCCCGCTCACATT |
| | | CGGCGGGGGAACCAAGGTCGAGATTAAG |
| 139112-aa | 81 | QVQLVESGGGLVQPGGSLRLSCAVSGFALSNHGMSWVRRAPGKGLEWVSGIVY |
| VH | | SGSTYYAASVKGRFTISRDNSRNTLYLQMNSLRPEDTAIYYCSAHGGESDVWG |
| | | QGTTVTVSS |
| 139112-aa | 96 | DIRLTQSPSPLSASVGDRVTITCQASEDINKFLNWYHQTPGKAPKLLIYDAST |
| VL | | LQTGVPSRFSGSGSGTDFTLTINSLQPEDIGTYYCQQYESLPLTFGGGTKVEI |
| | | K |
| 139112-aa | 111 | MALPVTALLLPLALLLHAARPQVQLVESGGGLVQPGGSLRLSCAVSGFALSNH |
| Full CAR | | GMSWVRRAPGKGLEWVSGIVYSGSTYYAASVKGRFTISRDNSRNTLYLQMNSL |
| | | RPEDTAIYYCSAHGGESDVWGQGTTVTVSSASGGGGSGGRASGGGGSDIRLTQ |
| | | SPSPLSASVGDRVTITCQASEDINKFLNWYHQTPGKAPKLLIYDASTLQTGVP |
| | | SRFSGSGSGTDFTLTINSLQPEDIGTYYCQQYESLPLTFGGGTKVEIKTTTPA |
| | | PRPPTPAPTIASQPLSLRPEACRPAAGGAVHTRGLDFACDIYIWAPLAGTCGV |
| | | LLLSLVITLYCKRGRKKLLYIFKQPFMRPVQTTQEEDGCSCRFPEEEEGGCEL |
| | | RVKFSRSADAPAYKQGQNQLYNELNLGRREEYDVLDKRRGRDPEMGGKPRRKN |
| | | PQEGLYNELQKDKMAEAYSEIGMKGERRRGKGHDGLYQGLSTATKDTYDALHM |
| | | QALPPR |
| 139112-nt | 126 | ATGGCCCTCCCTGTCACCGCCCTGCTGCTTCCGCTGGCTCTTCTGCTCCACGC |
| Full CAR | | CGCTCGGCCCCAAGTGCAACTCGTGGAATCTGGTGGAGGACTCGTGCAACCCG |
| | | GTGGAAGCCTTAGGCTGTCGTGCGCCGTCAGCGGGTTTGCTCTGAGCAACCAT |
| | | GGAATGTCCTGGGTCCGCCGGGCACCGGGAAAAGGGCTGGAATGGGTGTCCGG |
| | | CATCGTGTACAGCGGGTCAACCTATTACGCCGCGTCCGTGAAGGGCAGATTCA |
| | | CTATCTCAAGAGACAACAGCCGGAACACCCTGTACTTGCAAATGAATTCCCTG |
| | | CGCCCCGAGGACACCGCCATCTACTACTGCTCCGCCCACGGAGGAGAGTCGGA |
| | | CGTGTGGGGCCAGGGAACGACTGTGACTGTGTCCAGCGCATCAGGAGGGGGTG |
| | | GTTCGGGCGGCCGGGCCTCGGGGGGAGGAGGTTCCGACATTCGGCTGACCCAG |
| | | TCCCCGTCCCCACTGTCGGCCTCCGTCGGCGACCGCGTGACCATCACTTGTCA |
| | | GGCGTCCGAGGACATTAACAAGTTCCTGAACTGGTACCACCAGACCCCTGGAA |
| | | AGGCCCCCAAGCTGCTGATCTACGATGCCTCGACCCTTCAAACTGGAGTGCCT |
| | | AGCCGGTTCTCCGGGTCCGGCTCCGGCACTGATTTCACTCTGACCATCAACTC |
| | | ATTGCAGCCGGAAGATATCGGGACCTACTATTGCCAGCAGTACGAATCCCTCC |
| | | CGCTCACATTCGGCGGGGGAACCAAGGTCGAGATTAAGACCACTACCCCAGCA |
| | | CCGAGGCCACCCACCCCGGCTCCTACCATCGCCTCCCAGCCTCTGTCCCTGCG |
| | | TCCGGAGGCATGTAGACCCGCAGCTGGTGGGGCCGTGCATACCCGGGGTCTTG |
| | | ACTTCGCCTGCGATATCTACATTTGGGCCCCTCTGGCTGGTACTTGCGGGGTC |
| | | CTGCTGCTTTCACTCGTGATCACTCTTTACTGTAAGCGCGGTCGGAAGAAGCT |
| | | GCTGTACATCTTTAAGCAACCCTTCATGAGGCCTGTGCAGACTACTCAAGAGG |
| | | AGGACGGCTGTTCATGCCGGTTCCCAGAGGAGGAGGAAGGCGGCTGCGAACTG |
| | | CGCGTGAAATTCAGCCGCAGCGCAGATGCTCCAGCCTACAAGCAGGGGCAGAA |
| | | CCAGCTCTACAACGAACTCAATCTTGGTCGGAGAGAGGAGTACGACGTGCTGG |
| | | ACAAGCGGAGAGGACGGGACCCAGAAATGGGCGGGAAGCCGCGCAGAAAGAAT |
| | | CCCCAAGAGGGCCTGTACAACGAGCTCCAAAAGGATAAGATGGCAGAAGCCTA |
| | | TAGCGAGATTGGTATGAAAGGGGAACGCAGAAGAGGCAAAGGCCACGACGGAC |
| | | TGTACCAGGGACTCAGCACCGCCACCAAGGACACCTATGACGCTCTTCACATG |
| | | CAGGCCCTGCCGCCTCGG |

139113

| | | |
|---|---|---|
| 139113-aa | 52 | EVQLVETGGGLVQPGGSLRLSCAVSGFALSNHGMSWVRRAPGKGLEWVSGIVY |
| ScFv domain | | SGSTYYAASVKGRFTISRDNSRNTLYLQMNSLRPEDTAIYYCSAHGGESDVWG |
| | | QGTTVTVSSASGGGGSGGRASGGGGSETTLTQSPATLSVSPGERATLSCRASQ |
| | | SVGSNLAWYQQKPGQGPRLLIYGASTRATGIPARFSGSGSGTEFTLTISSLQP |
| | | EDFAVYYCQQYNDWLPVTFGQGTKVEIK |
| 139113-nt | 67 | GAAGTGCAATTGGTGGAAACTGGAGGAGGACTTGTGCAACCTGGAGGATCATT |
| ScFv domain | | GCGGCTCTCATGCGCTGTCTCCGGCTTCGCCCTGTCAAATCACGGGATGTCGT |
| | | GGGTCAGACGGGCCCCGGGAAAGGGTCTGGAATGGGTGTCGGGGATTGTGTAC |
| | | AGCGGCTCCACCTACTACGCCGCTTCGGTCAAGGGCCGCTTCACTATTTCACG |
| | | GGACAACAGCCGCAACACCCTCTATCTGCAAATGAACTCTCTCCGCCCGGAGG |
| | | ATACCGCCATCTACTACTGCTCCGCACACGGCGGCGAATCCGACGTGTGGGGA |
| | | CAGGGAACCACTGTCACCGTGTCGTCCGCATCCGGTGGCGGAGGATCGGGTGG |
| | | CCGGGCCTCCGGGGGCGGCGGCAGCGAGACTACCCTGACCCAGTCCCCTGCCA |
| | | CTCTGTCCGTGAGCCCGGGAGAGAGAGCCACCCTTAGCTGCCGGGCCAGCCAG |
| | | AGCGTGGGCTCCAACCTGGCCTGGTACCAGCAGAAGCCAGGACAGGGTCCCAG |
| | | GCTGCTGATCTACGGAGCCTCCACTCGCGCGACCGGCATCCCCGCGAGGTTCT |
| | | CCGGGTCGGGTTCCGGGACCGAGTTCACCCTGACCATCTCCTCCCTCCAACCG |
| | | GAGGACTTCGCGGTGTACTACTGTCAGCAGTACAACGATTGGCTGCCCGTGAC |
| | | ATTTGGACAGGGGACGAAGGTGGAAATCAAA |
| 139113-aa | 82 | EVQLVETGGGLVQPGGSLRLSCAVSGFALSNHGMSWVRRAPGKGLEWVSGIVY |
| VH | | SGSTYYAASVKGRFTISRDNSRNTLYLQMNSLRPEDTAIYYCSAHGGESDVWG |
| | | QGTTVTVSS |
| 139113-aa | 97 | ETTLTQSPATLSVSPGERATLSCRASQSVGSNLAWYQQKPGQGPRLLIYGAST |
| VL | | RATGIPARFSGSGSGTEFTLTISSLQPEDFAVYYCQQYNDWLPVTFGQGTKVE |
| | | IK |
| 139113-aa | 112 | MALPVTALLLPLALLLHAARPEVQLVETGGGLVQPGGSLRLSCAVSGFALSNH |
| Full CAR | | GMSWVRRAPGKGLEWVSGIVYSGSTYYAASVKGRFTISRDNSRNTLYLQMNSL |
| | | RPEDTAIYYCSAHGGESDVWGQGTTVTVSSASGGGGSGGRASGGGGSETTLTQ |
| | | SPATLSVSPGERATLSCRASQSVGSNLAWYQQKPGQGPRLLIYGASTRATGIP |
| | | ARFSGSGSGTEFTLTISSLQPEDFAVYYCQQYNDWLPVTFGQGTKVEIKTTTP |
| | | APRPPTPAPTIASQPLSLRPEACRPAAGGAVHTRGLDFACDIYIWAPLAGTCG |
| | | VLLLSLVITLYCKRGRKKLLYIFKQPFMRPVQTTQEEDGCSCRFPEEEEGGCE |
| | | LRVKFSRSADAPAYKQGQNQLYNELNLGRREEYDVLDKRRGRDPEMGGKPRRK |
| | | NPQEGLYNELQKDKMAEAYSEIGMKGERRRGKGHDGLYQGLSTATKDTYDALH |
| | | MQALPPR |
| 139113-nt | 127 | ATGGCCCTCCCTGTCACCGCCCTGCTGCTTCCGCTGGCTCTTCTGCTCCACGC |
| Full CAR | | CGCTCGGCCCGAAGTGCAATTGGTGGAAACTGGAGGAGGACTTGTGCAACCTG |
| | | GAGGATCATTGCGGCTCTCATGCGCTGTCTCCGGCTTCGCCCTGTCAAATCAC |
| | | GGGATGTCGTGGGTCAGACGGGCCCCGGGAAAGGGTCTGGAATGGGTGTCGGG |
| | | GATTGTGTACAGCGGCTCCACCTACTACGCCGCTTCGGTCAAGGGCCGCTTCA |
| | | CTATTTCACGGGACAACAGCCGCAACACCCTCTATCTGCAAATGAACTCTCTC |
| | | CGCCCGGAGGATACCGCCATCTACTACTGCTCCGCACACGGCGGCGAATCCGA |
| | | CGTGTGGGGACAGGGAACCACTGTCACCGTGTCGTCCGCATCCGGTGGCGGAG |
| | | GATCGGGTGGCCGGGCCTCCGGGGGCGGCGGCAGCGAGACTACCCTGACCCAG |
| | | TCCCCTGCCACTCTGTCCGTGAGCCCGGGAGAGAGAGCCACCCTTAGCTGCCG |
| | | GGCCAGCCAGAGCGTGGGCTCCAACCTGGCCTGGTACCAGCAGAAGCCAGGAC |
| | | AGGGTCCCAGGCTGCTGATCTACGGAGCCTCCACTCGCGCGACCGGCATCCCC |
| | | GCGAGGTTCTCCGGGTCGGGTTCCGGGACCGAGTTCACCCTGACCATCTCCTC |
| | | CCTCCAACCGGAGGACTTCGCGGTGTACTACTGTCAGCAGTACAACGATTGGC |
| | | TGCCCGTGACATTTGGACAGGGGACGAAGGTGGAAATCAAAACCACTACCCCA |
| | | GCACCGAGGCCACCCACCCCGGCTCCTACCATCGCCTCCCAGCCTCTGTCCCT |
| | | GCGTCCGGAGGCATGTAGACCCGCAGCTGGTGGGGCCGTGCATACCCGGGGTC |
| | | TTGACTTCGCCTGCGATATCTACATTTGGGCCCCTCTGGCTGGTACTTGCGGG |
| | | GTCCTGCTGCTTTCACTCGTGATCACTCTTTACTGTAAGCGCGGTCGGAAGAA |
| | | GCTGCTGTACATCTTTAAGCAACCCTTCATGAGGCCTGTGCAGACTACTCAAG |
| | | AGGAGGACGGCTGTTCATGCCGGTTCCCAGAGGAGGAGGAAGGCGGCTGCGAA |
| | | CTGCGCGTGAAATTCAGCCGCAGCGCAGATGCTCCAGCCTACAAGCAGGGGCA |
| | | GAACCAGCTCTACAACGAACTCAATCTTGGTCGGAGAGAGGAGTACGACGTGC |
| | | TGGACAAGCGGAGAGGACGGGACCCAGAAATGGGCGGGAAGCCGCGCAGAAAG |
| | | AATCCCCAAGAGGGCCTGTACAACGAGCTCCAAAAGGATAAGATGGCAGAAGC |
| | | CTATAGCGAGATTGGTATGAAAGGGGAACGCAGAAGAGGCAAAGGCCACGACG |
| | | GACTGTACCAGGGACTCAGCACCGCCACCAAGGACACCTATGACGCTCTTCAC |
| | | ATGCAGGCCCTGCCGCCTCGG |

139114

| | | |
|---|---|---|
| 139114-aa | 53 | EVQLVESGGGLVQPGGSLRLSCAVSGFALSNHGMSWVRRAPGKGLEWVSGIVY |
| ScFv domain | | SGSTYYAASVKGRFTISRDNSRNTLYLQMNSLRPEDTAIYYCSAHGGESDVWG |
| | | QGTTVTVSSASGGGGSGGRASGGGGSEIVLTQSPGTLSLSPGERATLSCRASQ |
| | | SIGSSSLAWYQQKPGQAPRLLMYGASSRASGIPDRFSGSGSGTDFTLTISRLE |
| | | PEDFAVYYCQQYAGSPPFTFGQGTKVEIK |
| 139114-nt | 68 | GAAGTGCAATTGGTGGAATCTGGTGGAGGACTTGTGCAACCTGGAGGATCACT |
| ScFv domain | | GAGACTGTCATGCGCGGTGTCCGGTTTTGCCCTGAGCAATCATGGGATGTCGT |
| | | GGGTCCGGCGCGCCCCCGGAAAGGGTCTGGAATGGGTGTCGGGTATCGTCTAC |
| | | TCCGGGAGCACTTACTACGCCGCGAGCGTGAAGGGCCGCTTCACCATTTCCCG |
| | | CGATAACTCCCGCAACACCCTGTACTTGCAAATGAACTCGCTCCGGCCTGAGG |
| | | ACACTGCCATCTACTACTGCTCCGCACACGGAGGAGAATCCGACGTGTGGGGC |
| | | CAGGGAACTACCGTGACCGTCAGCAGCGCCTCCGGCGGCGGGGGCTCAGGCGG |
| | | ACGGGCTAGCGGCGGCGGTGGCTCCGAGATCGTGCTGACCCAGTCGCCTGGCA |
| | | CTCTCTCGCTGAGCCCCGGGGAAAGGGCAACCCTGTCCTGTCGGGCCAGCCAG |
| | | TCCATTGGATCATCCTCCCTCGCCTGGTATCAGCAGAAACCGGGACAGGCTCC |
| | | GCGGCTGCTTATGTATGGGGCCAGCTCAAGAGCCTCCGGCATTCCCGACCGGT |
| | | TCTCCGGGTCCGGTTCCGGCACCGATTTCACCCTGACTATCTCGAGGCTGGAG |
| | | CCAGAGGACTTCGCCGTGTACTACTGCCAGCAGTACGCGGGGTCCCCGCCGTT |
| | | CACGTTCGGACAGGGAACCAAGGTCGAGATCAAG |
| 139114-aa | 83 | EVQLVESGGGLVQPGGSLRLSCAVSGFALSNHGMSWVRRAPGKGLEWVSGIVY |
| VH | | SGSTYYAASVKGRFTISRDNSRNTLYLQMNSLRPEDTAIYYCSAHGGESDVWG |
| | | QGTTVTVSS |
| 139114-aa | 98 | EIVLTQSPGTLSLSPGERATLSCRASQSIGSSSLAWYQQKPGQAPRLLMYGAS |
| VL | | SRASGIPDRFSGSGSGTDFTLTISRLEPEDFAVYYCQQYAGSPPFTFGQGTKV |
| | | EIK |
| 139114-aa | 113 | MALPVTALLLPLALLLHAARPEVQLVESGGGLVQPGGSLRLSCAVSGFALSNH |
| Full CAR | | GMSWVRRAPGKGLEWVSGIVYSGSTYYAASVKGRFTISRDNSRNTLYLQMNSL |
| | | RPEDTAIYYCSAHGGESDVWGQGTTVTVSSASGGGGSGGRASGGGGSEIVLTQ |
| | | SPGTLSLSPGERATLSCRASQSIGSSSLAWYQQKPGQAPRLLMYGASSRASGI |
| | | PDRFSGSGSGTDFTLTISRLEPEDFAVYYCQQYAGSPPFTFGQGTKVEIKTTT |
| | | PAPRPPTPAPTIASQPLSLRPEACRPAAGGAVHTRGLDFACDIYIWAPLAGTC |
| | | GVLLLSLVITLYCKRGRKKLLYIFKQPFMRPVQTTQEEDGCSCRFPEEEEGGC |
| | | ELRVKFSRSADAPAYKQGQNQLYNELNLGRREEYDVLDKRRGRDPEMGGKPRR |
| | | KNPQEGLYNELQKDKMAEAYSEIGMKGERRRGKGHDGLYQGLSTATKDTYDAL |
| | | HMQALPPR |
| 139114-nt | 128 | ATGGCCCTCCCTGTCACCGCCCTGCTGCTTCCGCTGGCTCTTCTGCTCCACGC |
| Full CAR | | CGCTCGGCCCGAAGTGCAATTGGTGGAATCTGGTGGAGGACTTGTGCAACCTG |
| | | GAGGATCACTGAGACTGTCATGCGCGGTGTCCGGTTTTGCCCTGAGCAATCAT |
| | | GGGATGTCGTGGGTCCGGCGCGCCCCCGGAAAGGGTCTGGAATGGGTGTCGGG |
| | | TATCGTCTACTCCGGGAGCACTTACTACGCCGCGAGCGTGAAGGGCCGCTTCA |
| | | CCATTTCCCGCGATAACTCCCGCAACACCCTGTACTTGCAAATGAACTCGCTC |
| | | CGGCCTGAGGACACTGCCATCTACTACTGCTCCGCACACGGAGGAGAATCCGA |
| | | CGTGTGGGGCCAGGGAACTACCGTGACCGTCAGCAGCGCCTCCGGCGGCGGGG |
| | | GCTCAGGCGGACGGGCTAGCGGCGGCGGTGGCTCCGAGATCGTGCTGACCCAG |
| | | TCGCCTGGCACTCTCTCGCTGAGCCCCGGGGAAAGGGCAACCCTGTCCTGTCG |
| | | GGCCAGCCAGTCCATTGGATCATCCTCCCTCGCCTGGTATCAGCAGAAACCGG |
| | | GACAGGCTCCGCGGCTGCTTATGTATGGGGCCAGCTCAAGAGCCTCCGGCATT |
| | | CCCGACCGGTTCTCCGGGTCCGGTTCCGGCACCGATTTCACCCTGACTATCTC |
| | | GAGGCTGGAGCCAGAGGACTTCGCCGTGTACTACTGCCAGCAGTACGCGGGGT |
| | | CCCCGCCGTTCACGTTCGGACAGGGAACCAAGGTCGAGATCAAGACCACTACC |
| | | CCAGCACCGAGGCCACCCACCCCGGCTCCTACCATCGCCTCCCAGCCTCTGTC |
| | | CCTGCGTCCGGAGGCATGTAGACCCGCAGCTGGTGGGGCCGTGCATACCCGGG |
| | | GTCTTGACTTCGCCTGCGATATCTACATTTGGGCCCCTCTGGCTGGTACTTGC |
| | | GGGGTCCTGCTGCTTTCACTCGTGATCACTCTTTACTGTAAGCGCGGTCGGAA |
| | | GAAGCTGCTGTACATCTTTAAGCAACCCTTCATGAGGCCTGTGCAGACTACTC |
| | | AAGAGGAGGACGGCTGTTCATGCCGGTTCCCAGAGGAGGAGGAAGGCGGCTGC |
| | | GAACTGCGCGTGAAATTCAGCCGCAGCGCAGATGCTCCAGCCTACAAGCAGGG |
| | | GCAGAACCAGCTCTACAACGAACTCAATCTTGGTCGGAGAGAGGAGTACGACG |
| | | TGCTGGACAAGCGGAGAGGACGGGACCCAGAAATGGGCGGGAAGCCGCGCAGA |
| | | AAGAATCCCCAAGAGGGCCTGTACAACGAGCTCCAAAAGGATAAGATGGCAGA |
| | | AGCCTATAGCGAGATTGGTATGAAAGGGGAACGCAGAAGAGGCAAAGGCCACG |
| | | ACGGACTGTACCAGGGACTCAGCACCGCCACCAAGGACACCTATGACGCTCTT |
| | | CACATGCAGGCCCTGCCGCCTCGG |

149362

| | | |
|---|---|---|
| 149362-aa | 129 | QVQLQESGPGLVKPSETLSLTCTVSGGSISSSYYYWGWIRQPPGKGLEWIGSI |
| ScFv domain | | YYSGSAYYNPSLKSRVTISVDTSKNQFSLRLSSVTAADTAVYYCARHWQEWPD |
| | | AFDIWGQGTMVTVSSGGGGSGGGGSGGGGSETTLTQSPAFMSATPGDKVIISC |
| | | KASQDIDDAMNWYQQKPGEAPLFIIQSATSPVPGIPPRFSGSGFGTDFSLTIN |
| | | NIESEDAAYYFCLQHDNFPLTFGQGTKLEIK |
| 149362-nt | 150 | CAAGTGCAGCTTCAGGAAAGCGGACCGGGCCTGGTCAAGCCATCCGAAACTCT |
| ScFv domain | | CTCCCTGACTTGCACTGTGTCTGGCGGTTCCATCTCATCGTCGTACTACTACT |
| | | GGGGCTGGATTAGGCAGCCGCCCGGAAAGGGACTGGAGTGGATCGGAAGCATC |
| | | TACTATTCCGGCTCGGCGTACTACAACCCTAGCCTCAAGTCGAGAGTGACCAT |
| | | CTCCGTGGATACCTCCAAGAACCAGTTTTCCCTGCGCCTGAGCTCCGTGACCG |
| | | CCGCTGACACCGCCGTGTACTACTGTGCTCGGCATTGGCAGGAATGGCCCGAT |
| | | GCCTTCGACATTTGGGGCCAGGGCACTATGGTCACTGTGTCATCCGGGGGTGG |
| | | AGGCAGCGGGGGAGGAGGGTCCGGGGGGGGAGGTTCAGAGACAACCTTGACCC |
| | | AGTCACCCGCATTCATGTCCGCCACTCCGGGAGACAAGGTCATCATCTCGTGC |
| | | AAAGCGTCCCAGGATATCGACGATGCCATGAATTGGTACCAGCAGAAGCCTGG |
| | | CGAAGCGCCGCTGTTCATTATCCAATCCGCAACCTCGCCCGTGCCTGGAATCC |
| | | CACCGCGGTTCAGCGGCAGCGGTTTCGGAACCGACTTTTCCCTGACCATTAAC |
| | | AACATTGAGTCCGAGGACGCCGCCTACTACTTCTGCCTGCAACACGACAACTT |
| | | CCCTCTCACGTTCGGCCAGGGAACCAAGCTGGAAATCAAG |
| 149362-aa | 171 | QVQLQESGPGLVKPSETLSLTCTVSGGSISSSYYYWGWIRQPPGKGLEWIGSI |
| VH | | YYSGSAYYNPSLKSRVTISVDTSKNQFSLRLSSVTAADTAVYYCARHWQEWPD |
| | | AFDIWGQGTMVTVSS |
| 149362-aa | 192 | ETTLTQSPAFMSATPGDKVIISCKASQDIDDAMNWYQQKPGEAPLFIIQSATS |
| VL | | PVPGIPPRFSGSGFGTDFSLTINNIESEDAAYYFCLQHDNFPLTFGQGTKLEI |
| | | K |
| 149362-aa | 213 | MALPVTALLLPLALLLHAARPQVQLQESGPGLVKPSETLSLTCTVSGGSISSS |
| Full CAR | | YYYWGWIRQPPGKGLEWIGSIYYSGSAYYNPSLKSRVTISVDTSKNQFSLRLS |
| | | SVTAADTAVYYCARHWQEWPDAFDIWGQGTMVTVSSGGGGSGGGGSGGGGSET |
| | | TLTQSPAFMSATPGDKVIISCKASQDIDDAMNWYQQKPGEAPLFIIQSATSPV |
| | | PGIPPRFSGSGFGTDFSLTINNIESEDAAYYFCLQHDNFPLTFGQGTKLEIKT |
| | | TTPAPRPPTPAPTIASQPLSLRPEACRPAAGGAVHTRGLDFACDIYIWAPLAG |
| | | TCGVLLLSLVITLYCKRGRKKLLYIFKQPFMRPVQTTQEEDGCSCRFPEEEEG |
| | | GCELRVKFSRSADAPAYKQGQNQLYNELNLGRREEYDVLDKRRGRDPEMGGKP |
| | | RRKNPQEGLYNELQKDKMAEAYSEIGMKGERRRGKGHDGLYQGLSTATKDTYD |
| | | ALHMQALPPR |
| 149362-nt | 234 | ATGGCCCTCCCTGTCACCGCCCTGCTGCTTCCGCTGGCTCTTCTGCTCCACGC |
| Full CAR | | CGCTCGGCCCCAAGTGCAGCTTCAGGAAAGCGGACCGGGCCTGGTCAAGCCAT |
| | | CCGAAACTCTCTCCCTGACTTGCACTGTGTCTGGCGGTTCCATCTCATCGTCG |
| | | TACTACTACTGGGGCTGGATTAGGCAGCCGCCCGGAAAGGGACTGGAGTGGAT |
| | | CGGAAGCATCTACTATTCCGGCTCGGCGTACTACAACCCTAGCCTCAAGTCGA |
| | | GAGTGACCATCTCCGTGGATACCTCCAAGAACCAGTTTTCCCTGCGCCTGAGC |
| | | TCCGTGACCGCCGCTGACACCGCCGTGTACTACTGTGCTCGGCATTGGCAGGA |
| | | ATGGCCCGATGCCTTCGACATTTGGGGCCAGGGCACTATGGTCACTGTGTCAT |
| | | CCGGGGGTGGAGGCAGCGGGGGAGGAGGGTCCGGGGGGGGAGGTTCAGAGACA |
| | | ACCTTGACCCAGTCACCCGCATTCATGTCCGCCACTCCGGGAGACAAGGTCAT |
| | | CATCTCGTGCAAAGCGTCCCAGGATATCGACGATGCCATGAATTGGTACCAGC |
| | | AGAAGCCTGGCGAAGCGCCGCTGTTCATTATCCAATCCGCAACCTCGCCCGTG |
| | | CCTGGAATCCCACCGCGGTTCAGCGGCAGCGGTTTCGGAACCGACTTTTCCCT |
| | | GACCATTAACAACATTGAGTCCGAGGACGCCGCCTACTACTTCTGCCTGCAAC |
| | | ACGACAACTTCCCTCTCACGTTCGGCCAGGGAACCAAGCTGGAAATCAAGACC |
| | | ACTACCCCAGCACCGAGGCCACCCACCCCGGCTCCTACCATCGCCTCCCAGCC |
| | | TCTGTCCCTGCGTCCGGAGGCATGTAGACCCGCAGCTGGTGGGGCCGTGCATA |
| | | CCCGGGGTCTTGACTTCGCCTGCGATATCTACATTTGGGCCCCTCTGGCTGGT |
| | | ACTTGCGGGGTCCTGCTGCTTTCACTCGTGATCACTCTTTACTGTAAGCGCGG |
| | | TCGGAAGAAGCTGCTGTACATCTTTAAGCAACCCTTCATGAGGCCTGTGCAGA |
| | | CTACTCAAGAGGAGGACGGCTGTTCATGCCGGTTCCCAGAGGAGGAGGAAGGC |
| | | GGCTGCGAACTGCGCGTGAAATTCAGCCGCAGCGCAGATGCTCCAGCCTACAA |
| | | GCAGGGGCAGAACCAGCTCTACAACGAACTCAATCTTGGTCGGAGAGAGGAGT |
| | | ACGACGTGCTGGACAAGCGGAGAGGACGGGACCCAGAAATGGGCGGGAAGCCG |
| | | CGCAGAAAGAATCCCCAAGAGGGCCTGTACAACGAGCTCCAAAAGGATAAGAT |
| | | GGCAGAAGCCTATAGCGAGATTGGTATGAAAGGGGAACGCAGAAGAGGCAAAG |
| | | GCCACGACGGACTGTACCAGGGACTCAGCACCGCCACCAAGGACACCTATGAC |
| | | GCTCTTCACATGCAGGCCCTGCCGCCTCGG |

149363

| | | |
|---|---|---|
| 149363-aa | 130 | VNLRESGPALVKPTQTLTLTCTFSGFSLRTSGMCVSWIRQPPGKALEWLARID |
| ScFv domain | | WDEDKFYSTSLKTRLTISKDTSDNQVVLRMTNMDPADTATYYCARSGAGGTSA |
| | | TAFDIWGPGTMVTVSSGGGGSGGGGSGGGGSDIQMTQSPSSLSASVGDRVTIT |
| | | CRASQDIYNNLAWFQLKPGSAPRSLMYAANKSQSGVPSRFSGSASGTDFTLTI |
| | | SSLQPEDFATYYCQHYYRFPYSFGQGTKLEIK |
| 149363-nt | 151 | CAAGTCAATCTGCGCGAATCCGGCCCCGCCTTGGTCAAGCCTACCCAGACCCT |
| ScFv domain | | CACTCTGACCTGTACTTTCTCCGGCTTCTCCCTGCGGACTTCCGGGATGTGCG |
| | | TGTCCTGGATCAGACAGCCTCCGGGAAAGGCCCTGGAGTGGCTCGCTCGCATT |
| | | GACTGGGATGAGGACAAGTTCTACTCCACCTCACTCAAGACCAGGCTGACCAT |
| | | CAGCAAAGATACCTCTGACAACCAAGTGGTGCTCCGCATGACCAACATGGACC |
| | | CAGCCGACACTGCCACTTACTACTGCGCGAGGAGCGGAGCGGGCGGAACCTCC |
| | | GCCACCGCCTTCGATATTTGGGGCCCGGGTACCATGGTCACCGTGTCAAGCGG |
| | | AGGAGGGGGGTCCGGGGGCGGCGGTTCCGGGGGAGGCGGATCGGACATTCAGA |
| | | TGACTCAGTCACCATCGTCCCTGAGCGCTAGCGTGGGCGACAGAGTGACAATC |
| | | ACTTGCCGGGCATCCCAGGACATCTATAACAACCTTGCGTGGTTCCAGCTGAA |
| | | GCCTGGTTCCGCACCGCGGTCACTTATGTACGCCGCCAACAAGAGCCAGTCGG |
| | | GAGTGCCGTCCCGGTTTTCCGGTTCGGCCTCGGGAACTGACTTCACCCTGACG |
| | | ATCTCCAGCCTGCAACCCGAGGATTTCGCCACCTACTACTGCCAGCACTACTA |
| | | CCGCTTTCCCTACTCGTTCGGACAGGGAACCAAGCTGGAAATCAAG |
| 149363-aa | 172 | QVNLRESGPALVKPTQTLTLTCTFSGFSLRTSGMCVSWIRQPPGKALEWLARI |
| VH | | DWDEDKFYSTSLKTRLTISKDTSDNQVVLRMTNMDPADTATYYCARSGAGGTS |
| | | ATAFDIWGPGTMVTVSS |
| 149363-aa | 193 | DIQMTQSPSSLSASVGDRVTITCRASQDIYNNLAWFQLKPGSAPRSLMYAANK |
| VL | | SQSGVPSRFSGSASGTDFTLTISSLQPEDFATYYCQHYYRFPYSFGQGTKLEI |
| | | K |
| 149363-aa | 214 | MALPVTALLLPLALLLHAARPQVNLRESGPALVKPTQTLTLTCTFSGFSLRTS |
| Full CAR | | GMCVSWIRQPPGKALEWLARIDWDEDKFYSTSLKTRLTISKDTSDNQVVLRMT |
| | | NMDPADTATYYCARSGAGGTSATAFDIWGPGTMVTVSSGGGGSGGGGSGGGGS |
| | | DIQMTQSPSSLSASVGDRVTITCRASQDIYNNLAWFQLKPGSAPRSLMYAANK |
| | | SQSGVPSRFSGSASGTDFTLTISSLQPEDFATYYCQHYYRFPYSFGQGTKLEI |
| | | KTTTPAPRPPTPAPTIASQPLSLRPEACRPAAGGAVHTRGLDFACDIYIWAPL |
| | | AGTCGVLLLSLVITLYCKRGRKKLLYIFKQPFMRPVQTTQEEDGCSCRFPEEE |
| | | EGGCELRVKFSRSADAPAYKQGQNQLYNELNLGRREEYDVLDKRRGRDPEMGG |
| | | KPRRKNPQEGLYNELQKDKMAEAYSEIGMKGERRRGKGHDGLYQGLSTATKDT |
| | | YDALHMQALPPR |
| 149363-nt | 235 | ATGGCCCTCCCTGTCACCGCCCTGCTGCTTCCGCTGGCTCTTCTGCTCCACGC |
| Full CAR | | CGCTCGGCCCCAAGTCAATCTGCGCGAATCCGGCCCCGCCTTGGTCAAGCCTA |
| | | CCCAGACCCTCACTCTGACCTGTACTTTCTCCGGCTTCTCCCTGCGGACTTCC |
| | | GGGATGTGCGTGTCCTGGATCAGACAGCCTCCGGGAAAGGCCCTGGAGTGGCT |
| | | CGCTCGCATTGACTGGGATGAGGACAAGTTCTACTCCACCTCACTCAAGACCA |
| | | GGCTGACCATCAGCAAAGATACCTCTGACAACCAAGTGGTGCTCCGCATGACC |
| | | AACATGGACCCAGCCGACACTGCCACTTACTACTGCGCGAGGAGCGGAGCGGG |
| | | CGGAACCTCCGCCACCGCCTTCGATATTTGGGGCCCGGGTACCATGGTCACCG |
| | | TGTCAAGCGGAGGAGGGGGGTCCGGGGGCGGCGGTTCCGGGGGAGGCGGATCG |
| | | GACATTCAGATGACTCAGTCACCATCGTCCCTGAGCGCTAGCGTGGGCGACAG |
| | | AGTGACAATCACTTGCCGGGCATCCCAGGACATCTATAACAACCTTGCGTGGT |
| | | TCCAGCTGAAGCCTGGTTCCGCACCGCGGTCACTTATGTACGCCGCCAACAAG |
| | | AGCCAGTCGGGAGTGCCGTCCCGGTTTTCCGGTTCGGCCTCGGGAACTGACTT |
| | | CACCCTGACGATCTCCAGCCTGCAACCCGAGGATTTCGCCACCTACTACTGCC |
| | | AGCACTACTACCGCTTTCCCTACTCGTTCGGACAGGGAACCAAGCTGGAAATC |
| | | AAGACCACTACCCCAGCACCGAGGCCACCCACCCCGGCTCCTACCATCGCCTC |
| | | CCAGCCTCTGTCCCTGCGTCCGGAGGCATGTAGACCCGCAGCTGGTGGGGCCG |
| | | TGCATACCCGGGGTCTTGACTTCGCCTGCGATATCTACATTTGGGCCCCTCTG |
| | | GCTGGTACTTGCGGGGTCCTGCTGCTTTCACTCGTGATCACTCTTTACTGTAA |
| | | GCGCGGTCGGAAGAAGCTGCTGTACATCTTTAAGCAACCCTTCATGAGGCCTG |
| | | TGCAGACTACTCAAGAGGAGGACGGCTGTTCATGCCGGTTCCCAGAGGAGGAG |
| | | GAAGGCGGCTGCGAACTGCGCGTGAAATTCAGCCGCAGCGCAGATGCTCCAGC |
| | | CTACAAGCAGGGGCAGAACCAGCTCTACAACGAACTCAATCTTGGTCGGAGAG |
| | | AGGAGTACGACGTGCTGGACAAGCGGAGAGGACGGGACCCAGAAATGGGCGGG |
| | | AAGCCGCGCAGAAAGAATCCCCAAGAGGGCCTGTACAACGAGCTCCAAAAGGA |
| | | TAAGATGGCAGAAGCCTATAGCGAGATTGGTATGAAAGGGGAACGCAGAAGAG |
| | | GCAAAGGCCACGACGGACTGTACCAGGGACTCAGCACCGCCACCAAGGACACC |
| | | TATGACGCTCTTCACATGCAGGCCCTGCCGCCTCGG |

149364

| | | |
|---|---|---|
| 149364-aa | 131 | EVQLVESGGGLVKPGGSLRLSCAASGFTFSSYSMNWVRQAPGKGLEWVSSISS |
| ScFv domain | | SSSYIYYADSVKGRFTISRDNAKNSLYLQMNSLRAEDTAVYYCAKTIAAVYAF |
| | | DIWGQGTTVTVSSGGGGSGGGGSGGGGSEIVLTQSPLSLPVTPEEPASISCRS |
| | | SQSLLHSNGYNYLDWYLQKPGQSPQLLIYLGSNRASGVPDRFSGSGSGTDFTL |
| | | KISRVEAEDVGVYYCMQALQTPYTFGQGTKLEIK |
| 149364-nt | 152 | GAAGTGCAGCTTGTCGAATCCGGGGGGGGACTGGTCAAGCCGGGCGGATCACT |
| ScFv domain | | GAGACTGTCCTGCGCCGCGAGCGGCTTCACGTTCTCCTCCTACTCCATGAACT |
| | | GGGTCCGCCAAGCCCCCGGGAAGGGACTGGAATGGGTGTCCTCTATCTCCTCG |
| | | TCGTCGTCCTACATCTACTACGCCGACTCCGTGAAGGGAAGATTCACCATTTC |
| | | CCGCGACAACGCAAAGAACTCACTGTACTTGCAAATGAACTCACTCCGGGCCG |
| | | AAGATACTGCTGTGTACTATTGCGCCAAGACTATTGCCGCCGTCTACGCTTTC |
| | | GACATCTGGGGCCAGGGAACCACCGTGACTGTGTCGTCCGGTGGTGGTGGCTC |
| | | GGGCGGAGGAGGAAGCGGCGGCGGGGGGTCCGAGATTGTGCTGACCCAGTCGC |
| | | CACTGAGCCTCCCTGTGACCCCCGAGGAACCCGCCAGCATCAGCTGCCGGTCC |
| | | AGCCAGTCCCTGCTCCACTCCAACGGATACAATTACCTCGATTGGTACCTTCA |
| | | GAAGCCTGGACAAAGCCCGCAGCTGCTCATCTACTTGGGATCAAACCGCGCGT |
| | | CAGGAGTGCCTGACCGGTTCTCCGGCTCGGGCAGCGGTACCGATTTCACCCTG |
| | | AAAATCTCCAGGGTGGAGGCAGAGGACGTGGGAGTGTATTACTGTATGCAGGC |
| | | GCTGCAGACTCCGTACACATTTGGGCAGGGCACCAAGCTGGAGATCAAG |
| 149364-aa | 173 | EVQLVESGGGLVKPGGSLRLSCAASGFTFSSYSMNWVRQAPGKGLEWVSSISS |
| VH | | SSSYIYYADSVKGRFTISRDNAKNSLYLQMNSLRAEDTAVYYCAKTIAAVYAF |
| | | DIWGQGTTVTVSS |
| 149364-aa | 194 | EIVLTQSPLSLPVTPEEPASISCRSSQSLLHSNGYNYLDWYLQKPGQSPQLLI |
| VL | | YLGSNRASGVPDRFSGSGSGTDFTLKISRVEAEDVGVYYCMQALQTPYTFGQG |
| | | TKLEIK |
| 149364-aa | 215 | MALPVTALLLPLALLLHAARPEVQLVESGGGLVKPGGSLRLSCAASGFTFSSY |
| Full CAR | | SMNWVRQAPGKGLEWVSSISSSSSYIYYADSVKGRFTISRDNAKNSLYLQMNS |
| | | LRAEDTAVYYCAKTIAAVYAFDIWGQGTTVTVSSGGGGSGGGGSGGGGSEIVL |
| | | TQSPLSLPVTPEEPASISCRSSQSLLHSNGYNYLDWYLQKPGQSPQLLIYLGS |
| | | NRASGVPDRFSGSGSGTDFTLKISRVEAEDVGVYYCMQALQTPYTFGQGTKLE |
| | | IKTTTPAPRPPTPAPTIASQPLSLRPEACRPAAGGAVHTRGLDFACDIYIWAP |
| | | LAGTCGVLLLSLVITLYCKRGRKKLLYIFKQPFMRPVQTTQEEDGCSCRFPEE |
| | | EEGGCELRVKFSRSADAPAYKQGQNQLYNELNLGRREEYDVLDKRRGRDPEMG |
| | | GKPRRKNPQEGLYNELQKDKMAEAYSEIGMKGERRRGKGHDGLYQGLSTATKD |
| | | TYDALHMQALPPR |
| 149364-nt | 236 | ATGGCCCTCCCTGTCACCGCCCTGCTGCTTCCGCTGGCTCTTCTGCTCCACGC |
| Full CAR | | CGCTCGGCCCGAAGTGCAGCTTGTCGAATCCGGGGGGGGACTGGTCAAGCCGG |
| | | GCGGATCACTGAGACTGTCCTGCGCCGCGAGCGGCTTCACGTTCTCCTCCTAC |
| | | TCCATGAACTGGGTCCGCCAAGCCCCCGGGAAGGGACTGGAATGGGTGTCCTC |
| | | TATCTCCTCGTCGTCGTCCTACATCTACTACGCCGACTCCGTGAAGGGAAGAT |
| | | TCACCATTTCCCGCGACAACGCAAAGAACTCACTGTACTTGCAAATGAACTCA |
| | | CTCCGGGCCGAAGATACTGCTGTGTACTATTGCGCCAAGACTATTGCCGCCGT |
| | | CTACGCTTTCGACATCTGGGGCCAGGGAACCACCGTGACTGTGTCGTCCGGTG |
| | | GTGGTGGCTCGGGCGGAGGAGGAAGCGGCGGCGGGGGGTCCGAGATTGTGCTG |
| | | ACCCAGTCGCCACTGAGCCTCCCTGTGACCCCCGAGGAACCCGCCAGCATCAG |
| | | CTGCCGGTCCAGCCAGTCCCTGCTCCACTCCAACGGATACAATTACCTCGATT |
| | | GGTACCTTCAGAAGCCTGGACAAAGCCCGCAGCTGCTCATCTACTTGGGATCA |
| | | AACCGCGCGTCAGGAGTGCCTGACCGGTTCTCCGGCTCGGGCAGCGGTACCGA |
| | | TTTCACCCTGAAAATCTCCAGGGTGGAGGCAGAGGACGTGGGAGTGTATTACT |
| | | GTATGCAGGCGCTGCAGACTCCGTACACATTTGGGCAGGGCACCAAGCTGGAG |
| | | ATCAAGACCACTACCCCAGCACCGAGGCCACCCACCCCGGCTCCTACCATCGC |
| | | CTCCCAGCCTCTGTCCCTGCGTCCGGAGGCATGTAGACCCGCAGCTGGTGGGG |
| | | CCGTGCATACCCGGGGTCTTGACTTCGCCTGCGATATCTACATTTGGGCCCCT |
| | | CTGGCTGGTACTTGCGGGGTCCTGCTGCTTTCACTCGTGATCACTCTTTACTG |
| | | TAAGCGCGGTCGGAAGAAGCTGCTGTACATCTTTAAGCAACCCTTCATGAGGC |
| | | CTGTGCAGACTACTCAAGAGGAGGACGGCTGTTCATGCCGGTTCCCAGAGGAG |
| | | GAGGAAGGCGGCTGCGAACTGCGCGTGAAATTCAGCCGCAGCGCAGATGCTCC |
| | | AGCCTACAAGCAGGGGCAGAACCAGCTCTACAACGAACTCAATCTTGGTCGGA |
| | | GAGAGGAGTACGACGTGCTGGACAAGCGGAGAGGACGGGACCCAGAAATGGGC |
| | | GGGAAGCCGCGCAGAAAGAATCCCCAAGAGGGCCTGTACAACGAGCTCCAAAA |
| | | GGATAAGATGGCAGAAGCCTATAGCGAGATTGGTATGAAAGGGGAACGCAGAA |
| | | GAGGCAAAGGCCACGACGGACTGTACCAGGGACTCAGCACCGCCACCAAGGAC |
| | | ACCTATGACGCTCTTCACATGCAGGCCCTGCCGCCTCGG |

149365

| | | |
|---|---|---|
| 149365-aa | 132 | EVQLVESGGGLVKPGGSLRLSCAASGFTFSDYYMSWIRQAPGKGLEWVSYISS |
| ScFv domain | | SGSTIYYADSVKGRFTISRDNAKNSLYLQMNSLRAEDTAVYYCARDLRGAFDI |
| | | WGQGTMVTVSSGGGGSGGGGSGGGGSSYVLTQSPSVSAAPGYTATISCGGNNI |
| | | GTKSVHWYQQKPGQAPLLVIRDDSVRPSKIPGRFSGSNSGNMATLTISGVQAG |
| | | DEADFYCQVWDSDSEHVVFGGGTKLTVL |
| 149365-nt | 153 | GAAGTCCAGCTCGTGGAGTCCGGCGGAGGCCTTGTGAAGCCTGGAGGTTCGCT |
| ScFv domain | | GAGACTGTCCTGCGCCGCCTCCGGCTTCACCTTCTCCGACTACTACATGTCCT |
| | | GGATCAGACAGGCCCCGGGAAAGGGCCTGGAATGGGTGTCCTACATCTCGTCA |
| | | TCGGGCAGCACTATCTACTACGCGGACTCAGTGAAGGGGCGGTTCACCATTTC |
| | | CCGGGATAACGCGAAGAACTCGCTGTATCTGCAAATGAACTCACTGAGGGCCG |
| | | AGGACACCGCCGTGTACTACTGCGCCCGCGATCTCCGCGGGGCATTTGACATC |
| | | TGGGGACAGGGAACCATGGTCACAGTGTCCAGCGGAGGGGGAGGATCGGGTGG |
| | | CGGAGGTTCCGGGGGTGGAGGCTCCTCCTACGTGCTGACTCAGAGCCCAAGCG |
| | | TCAGCGCTGCGCCCGGTTACACGGCAACCATCTCCTGTGGCGGAAACAACATT |
| | | GGGACCAAGTCTGTGCACTGGTATCAGCAGAAGCCGGGCCAAGCTCCCCTGTT |
| | | GGTGATCCGCGATGACTCCGTGCGGCCTAGCAAAATTCCGGGACGGTTCTCCG |
| | | GCTCCAACAGCGGCAATATGGCCACTCTCACCATCTCGGGAGTGCAGGCCGGA |
| | | GATGAAGCCGACTTCTACTGCCAAGTCTGGGACTCAGACTCCGAGCATGTGGT |
| | | GTTCGGGGGCGGAACCAAGCTGACTGTGCTC |
| 149365-aa | 174 | EVQLVESGGGLVKPGGSLRLSCAASGFTFSDYYMSWIRQAPGKGLEWVSYISS |
| VH | | SGSTIYYADSVKGRFTISRDNAKNSLYLQMNSLRAEDTAVYYCARDLRGAFDI |
| | | WGQGTMVTVSS |
| 149365-aa | 195 | SYVLTQSPSVSAAPGYTATISCGGNNIGTKSVHWYQQKPGQAPLLVIRDDSVR |
| VL | | PSKIPGRFSGSNSGNMATLTISGVQAGDEADFYCQVWDSDSEHVVFGGGTKLT |
| | | VL |
| 149365-aa | 216 | MALPVTALLLPLALLLHAARPEVQLVESGGGLVKPGGSLRLSCAASGFTFSDY |
| Full CAR | | YMSWIRQAPGKGLEWVSYISSSGSTIYYADSVKGRFTISRDNAKNSLYLQMNS |
| | | LRAEDTAVYYCARDLRGAFDIWGQGTMVTVSSGGGGSGGGGSGGGGSSYVLTQ |
| | | SPSVSAAPGYTATISCGGNNIGTKSVHWYQQKPGQAPLLVIRDDSVRPSKIPG |
| | | RFSGSNSGNMATLTISGVQAGDEADFYCQVWDSDSEHVVFGGGTKLTVLTTTP |
| | | APRPPTPAPTIASQPLSLRPEACRPAAGGAVHTRGLDFACDIYIWAPLAGTCG |
| | | VLLLSLVITLYCKRGRKKLLYIFKQPFMRPVQTTQEEDGCSCRFPEEEEGGCE |
| | | LRVKFSRSADAPAYKQGQNQLYNELNLGRREEYDVLDKRRGRDPEMGGKPRRK |
| | | NPQEGLYNELQKDKMAEAYSEIGMKGERRRGKGHDGLYQGLSTATKDTYDALH |
| | | MQALPPR |
| 149365-nt | 237 | ATGGCCCTCCCTGTCACCGCCCTGCTGCTTCCGCTGGCTCTTCTGCTCCACGC |
| Full CAR | | CGCTCGGCCCGAAGTCCAGCTCGTGGAGTCCGGCGGAGGCCTTGTGAAGCCTG |
| | | GAGGTTCGCTGAGACTGTCCTGCGCCGCCTCCGGCTTCACCTTCTCCGACTAC |
| | | TACATGTCCTGGATCAGACAGGCCCCGGGAAAGGGCCTGGAATGGGTGTCCTA |
| | | CATCTCGTCATCGGGCAGCACTATCTACTACGCGGACTCAGTGAAGGGGCGGT |
| | | TCACCATTTCCCGGGATAACGCGAAGAACTCGCTGTATCTGCAAATGAACTCA |
| | | CTGAGGGCCGAGGACACCGCCGTGTACTACTGCGCCCGCGATCTCCGCGGGGC |
| | | ATTTGACATCTGGGGACAGGGAACCATGGTCACAGTGTCCAGCGGAGGGGGAG |
| | | GATCGGGTGGCGGAGGTTCCGGGGGTGGAGGCTCCTCCTACGTGCTGACTCAG |
| | | AGCCCAAGCGTCAGCGCTGCGCCCGGTTACACGGCAACCATCTCCTGTGGCGG |
| | | AAACAACATTGGGACCAAGTCTGTGCACTGGTATCAGCAGAAGCCGGGCCAAG |
| | | CTCCCCTGTTGGTGATCCGCGATGACTCCGTGCGGCCTAGCAAAATTCCGGGA |
| | | CGGTTCTCCGGCTCCAACAGCGGCAATATGGCCACTCTCACCATCTCGGGAGT |
| | | GCAGGCCGGAGATGAAGCCGACTTCTACTGCCAAGTCTGGGACTCAGACTCCG |
| | | AGCATGTGGTGTTCGGGGGCGGAACCAAGCTGACTGTGCTCACCACTACCCCA |
| | | GCACCGAGGCCACCCACCCCGGCTCCTACCATCGCCTCCCAGCCTCTGTCCCT |
| | | GCGTCCGGAGGCATGTAGACCCGCAGCTGGTGGGGCCGTGCATACCCGGGGTC |
| | | TTGACTTCGCCTGCGATATCTACATTTGGGCCCCTCTGGCTGGTACTTGCGGG |
| | | GTCCTGCTGCTTTCACTCGTGATCACTCTTTACTGTAAGCGCGGTCGGAAGAA |
| | | GCTGCTGTACATCTTTAAGCAACCCTTCATGAGGCCTGTGCAGACTACTCAAG |
| | | AGGAGGACGGCTGTTCATGCCGGTTCCCAGAGGAGGAGGAAGGCGGCTGCGAA |
| | | CTGCGCGTGAAATTCAGCCGCAGCGCAGATGCTCCAGCCTACAAGCAGGGGCA |
| | | GAACCAGCTCTACAACGAACTCAATCTTGGTCGGAGAGAGGAGTACGACGTGC |
| | | TGGACAAGCGGAGAGGACGGGACCCAGAAATGGGCGGGAAGCCGCGCAGAAAG |
| | | AATCCCCAAGAGGGCCTGTACAACGAGCTCCAAAAGGATAAGATGGCAGAAGC |
| | | CTATAGCGAGATTGGTATGAAAGGGGAACGCAGAAGAGGCAAAGGCCACGACG |
| | | GACTGTACCAGGGACTCAGCACCGCCACCAAGGACACCTATGACGCTCTTCAC |
| | | ATGCAGGCCCTGCCGCCTCGG |

149366

| | | |
|---|---|---|
| 149366-aa | 133 | QVQLVQSGAEVKKPGASVKVSCKPSGYTVTSHYIHWVRRAPGQGLEWMGMINP |
| ScFv domain | | SGGVTAYSQTLQGRVTMTSDTSSSTVYMELSSLRSEDTAMYYCAREGSGSGWY |
| | | FDFWGRGTLVTVSSGGGGSGGGGSGGGGSSYVLTQPPSVSVSPGQTASITCSG |
| | | DGLSKKYVSWYQQKAGQSPVVLISRDKERPSGIPDRFSGSNSADTATLTISGT |
| | | QAMDEADYYCQAWDDTTVVFGGGTKLTVL |
| 149366-nt | 154 | CAAGTGCAGCTGGTGCAGAGCGGGGCCGAAGTCAAGAAGCCGGGAGCCTCCGT |
| ScFv domain | | GAAAGTGTCCTGCAAGCCTTCGGGATACACCGTGACCTCCCACTACATTCATT |
| | | GGGTCCGCCGCGCCCCCGGCCAAGGACTCGAGTGGATGGGCATGATCAACCCT |
| | | AGCGGCGGAGTGACCGCGTACAGCCAGACGCTGCAGGGACGCGTGACTATGAC |
| | | CTCGGATACCTCCTCCTCCACCGTCTATATGGAACTGTCCAGCCTGCGGTCCG |
| | | AGGATACCGCCATGTACTACTGCGCCCGGGAAGGATCAGGCTCCGGGTGGTAT |
| | | TTCGACTTCTGGGGAAGAGGCACCCTCGTGACTGTGTCATCTGGGGGAGGGGG |
| | | TTCCGGTGGTGGCGGATCGGGAGGAGGCGGTTCATCCTACGTGCTGACCCAGC |
| | | CACCCTCCGTGTCCGTGAGCCCCGGCCAGACTGCATCGATTACATGTAGCGGC |
| | | GACGGCCTCTCCAAGAAATACGTGTCGTGGTACCAGCAGAAGGCCGGACAGAG |
| | | CCCGGTGGTGCTGATCTCAAGAGATAAGGAGCGGCCTAGCGGAATCCCGGACA |
| | | GGTTCTCGGGTTCCAACTCCGCGGACACTGCTACTCTGACCATCTCGGGGACC |
| | | CAGGCTATGGACGAAGCCGATTACTACTGCCAAGCCTGGGACGACACTACTGT |
| | | CGTGTTTGGAGGGGGCACCAAGTTGACCGTCCTT |
| 149366-aa | 175 | QVQLVQSGAEVKKPGASVKVSCKPSGYTVTSHYIHWVRRAPGQGLEWMGMINP |
| VH | | SGGVTAYSQTLQGRVTMTSDTSSSTVYMELSSLRSEDTAMYYCAREGSGSGWY |
| | | FDFWGRGTLVTVSS |
| 149366-aa | 196 | SYVLTQPPSVSVSPGQTASITCSGDGLSKKYVSWYQQKAGQSPVVLISRDKER |
| VL | | PSGIPDRFSGSNSADTATLTISGTQAMDEADYYCQAWDDTTVVFGGGTKLTVL |
| 149366-aa | 217 | MALPVTALLLPLALLLHAARPQVQLVQSGAEVKKPGASVKVSCKPSGYTVTSH |
| Full CAR | | YIHWVRRAPGQGLEWMGMINPSGGVTAYSQTLQGRVTMTSDTSSSTVYMELSS |
| | | LRSEDTAMYYCAREGSGSGWYFDFWGRGTLVTVSSGGGGSGGGGSGGGGSSYV |
| | | LTQPPSVSVSPGQTASITCSGDGLSKKYVSWYQQKAGQSPVVLISRDKERPSG |
| | | IPDRFSGSNSADTATLTISGTQAMDEADYYCQAWDDTTVVFGGGTKLTVLTTT |
| | | PAPRPPTPAPTIASQPLSLRPEACRPAAGGAVHTRGLDFACDIYIWAPLAGTC |
| | | GVLLLSLVITLYCKRGRKKLLYIFKQPFMRPVQTTQEEDGCSCRFPEEEEGGC |
| | | ELRVKFSRSADAPAYKQGQNQLYNELNLGRREEYDVLDKRRGRDPEMGGKPRR |
| | | KNPQEGLYNELQKDKMAEAYSEIGMKGERRRGKGHDGLYQGLSTATKDTYDAL |
| | | HMQALPPR |
| 149366-nt | 238 | ATGGCCCTCCCTGTCACCGCCCTGCTGCTTCCGCTGGCTCTTCTGCTCCACGC |
| Full CAR | | CGCTCGGCCCCAAGTGCAGCTGGTGCAGAGCGGGGCCGAAGTCAAGAAGCCGG |
| | | GAGCCTCCGTGAAAGTGTCCTGCAAGCCTTCGGGATACACCGTGACCTCCCAC |
| | | TACATTCATTGGGTCCGCCGCGCCCCCGGCCAAGGACTCGAGTGGATGGGCAT |
| | | GATCAACCCTAGCGGCGGAGTGACCGCGTACAGCCAGACGCTGCAGGGACGCG |
| | | TGACTATGACCTCGGATACCTCCTCCTCCACCGTCTATATGGAACTGTCCAGC |
| | | CTGCGGTCCGAGGATACCGCCATGTACTACTGCGCCCGGGAAGGATCAGGCTC |
| | | CGGGTGGTATTTCGACTTCTGGGGAAGAGGCACCCTCGTGACTGTGTCATCTG |
| | | GGGGAGGGGGTTCCGGTGGTGGCGGATCGGGAGGAGGCGGTTCATCCTACGTG |
| | | CTGACCCAGCCACCCTCCGTGTCCGTGAGCCCCGGCCAGACTGCATCGATTAC |
| | | ATGTAGCGGCGACGGCCTCTCCAAGAAATACGTGTCGTGGTACCAGCAGAAGG |
| | | CCGGACAGAGCCCGGTGGTGCTGATCTCAAGAGATAAGGAGCGGCCTAGCGGA |
| | | ATCCCGGACAGGTTCTCGGGTTCCAACTCCGCGGACACTGCTACTCTGACCAT |
| | | CTCGGGGACCCAGGCTATGGACGAAGCCGATTACTACTGCCAAGCCTGGGACG |
| | | ACACTACTGTCGTGTTTGGAGGGGGCACCAAGTTGACCGTCCTTACCACTACC |
| | | CCAGCACCGAGGCCACCCACCCCGGCTCCTACCATCGCCTCCCAGCCTCTGTC |
| | | CCTGCGTCCGGAGGCATGTAGACCCGCAGCTGGTGGGGCCGTGCATACCCGGG |
| | | GTCTTGACTTCGCCTGCGATATCTACATTTGGGCCCCTCTGGCTGGTACTTGC |
| | | GGGGTCCTGCTGCTTTCACTCGTGATCACTCTTTACTGTAAGCGCGGTCGGAA |
| | | GAAGCTGCTGTACATCTTTAAGCAACCCTTCATGAGGCCTGTGCAGACTACTC |
| | | AAGAGGAGGACGGCTGTTCATGCCGGTTCCCAGAGGAGGAGGAAGGCGGCTGC |
| | | GAACTGCGCGTGAAATTCAGCCGCAGCGCAGATGCTCCAGCCTACAAGCAGGG |
| | | GCAGAACCAGCTCTACAACGAACTCAATCTTGGTCGGAGAGAGGAGTACGACG |
| | | TGCTGGACAAGCGGAGAGGACGGGACCCAGAAATGGGCGGGAAGCCGCGCAGA |
| | | AAGAATCCCCAAGAGGGCCTGTACAACGAGCTCCAAAAGGATAAGATGGCAGA |
| | | AGCCTATAGCGAGATTGGTATGAAAGGGGAACGCAGAAGAGGCAAAGGCCACG |
| | | ACGGACTGTACCAGGGACTCAGCACCGCCACCAAGGACACCTATGACGCTCTT |
| | | CACATGCAGGCCCTGCCGCCTCGG |

149367

| | | |
|---|---|---|
| 149367-aa | 134 | QVQLQESGPGLVKPSQTLSLTCTVSGGSISSGGYYWSWIRQHPGKGLEWIGYI |
| ScFv domain | | YYSGSTYYNPSLKSRVTISVDTSKNQFSLKLSSVTAADTAVYYCARAGIAARL |
| | | RGAFDIWGQGTMVTVSSGGGGSGGGGSGGGGSDIVMTQSPSSVSASVGDRVII |
| | | TCRASQGIRNWLAWYQQKPGKAPNLLIYAASNLQSGVPSRFSGSGSGADFTLT |
| | | ISSLQPEDVATYYCQKYNSAPFTFGPGTKVDIK |
| 149367-nt | 155 | CAAGTGCAGCTTCAGGAGAGCGGCCCGGGACTCGTGAAGCCGTCCCAGACCCT |
| ScFv domain | | GTCCCTGACTTGCACCGTGTCGGGAGGAAGCATCTCGAGCGGAGGCTACTATT |
| | | GGTCGTGGATTCGGCAGCACCCTGGAAAGGGCCTGGAATGGATCGGCTACATC |
| | | TACTACTCCGGCTCGACCTACTACAACCCATCGCTGAAGTCCAGAGTGACAAT |
| | | CTCAGTGGACACGTCCAAGAATCAGTTCAGCCTGAAGCTCTCTTCCGTGACTG |
| | | CGGCCGACACCGCCGTGTACTACTGCGCACGCGCTGGAATTGCCGCCCGGCTG |
| | | AGGGGTGCCTTCGACATTTGGGGACAGGGCACCATGGTCACCGTGTCCTCCGG |
| | | CGGCGGAGGTTCCGGGGGTGGAGGCTCAGGAGGAGGGGGGTCCGACATCGTCA |
| | | TGACTCAGTCGCCCTCAAGCGTCAGCGCGTCCGTCGGGGACAGAGTGATCATC |
| | | ACCTGTCGGGCGTCCCAGGGAATTCGCAACTGGCTGGCCTGGTATCAGCAGAA |
| | | GCCCGGAAAGGCCCCCAACCTGTTGATCTACGCCGCCTCAAACCTCCAATCCG |
| | | GGGTGCCGAGCCGCTTCAGCGGCTCCGGTTCGGGTGCCGATTTCACTCTGACC |
| | | ATCTCCTCCCTGCAACCTGAAGATGTGGCTACCTACTACTGCCAAAAGTACAA |
| | | CTCCGCACCTTTTACTTTCGGACCGGGGACCAAAGTGGACATTAAG |
| 149367-aa | 176 | QVQLQESGPGLVKPSQTLSLTCTVSGGSISSGGYYWSWIRQHPGKGLEWIGYI |
| VH | | YYSGSTYYNPSLKSRVTISVDTSKNQFSLKLSSVTAADTAVYYCARAGIAARL |
| | | RGAFDIWGQGTMVTVSS |
| 149367-aa | 197 | DIVMTQSPSSVSASVGDRVIITCRASQGIRNWLAWYQQKPGKAPNLLIYAASN |
| VL | | LQSGVPSRFSGSGSGADFTLTISSLQPEDVATYYCQKYNSAPFTFGPGTKVDI |
| | | K |
| 149367-aa | 218 | MALPVTALLLPLALLLHAARPQVQLQESGPGLVKPSQTLSLTCTVSGGSISSG |
| Full CAR | | GYYWSWIRQHPGKGLEWIGYIYYSGSTYYNPSLKSRVTISVDTSKNQFSLKLS |
| | | SVTAADTAVYYCARAGIAARLRGAFDIWGQGTMVTVSSGGGGSGGGGSGGGGS |
| | | DIVMTQSPSSVSASVGDRVIITCRASQGIRNWLAWYQQKPGKAPNLLIYAASN |
| | | LQSGVPSRFSGSGSGADFTLTISSLQPEDVATYYCQKYNSAPFTFGPGTKVDI |
| | | KTTTPAPRPPTPAPTIASQPLSLRPEACRPAAGGAVHTRGLDFACDIYIWAPL |
| | | AGTCGVLLLSLVITLYCKRGRKKLLYIFKQPFMRPVQTTQEEDGCSCRFPEEE |
| | | EGGCELRVKFSRSADAPAYKQGQNQLYNELNLGRREEYDVLDKRRGRDPEMGG |
| | | KPRRKNPQEGLYNELQKDKMAEAYSEIGMKGERRRGKGHDGLYQGLSTATKDT |
| | | YDALHMQALPPR |
| 149367-nt | 239 | ATGGCCCTCCCTGTCACCGCCCTGCTGCTTCCGCTGGCTCTTCTGCTCCACGC |
| Full CAR | | CGCTCGGCCCCAAGTGCAGCTTCAGGAGAGCGGCCCGGGACTCGTGAAGCCGT |
| | | CCCAGACCCTGTCCCTGACTTGCACCGTGTCGGGAGGAAGCATCTCGAGCGGA |
| | | GGCTACTATTGGTCGTGGATTCGGCAGCACCCTGGAAAGGGCCTGGAATGGAT |
| | | CGGCTACATCTACTACTCCGGCTCGACCTACTACAACCCATCGCTGAAGTCCA |
| | | GAGTGACAATCTCAGTGGACACGTCCAAGAATCAGTTCAGCCTGAAGCTCTCT |
| | | TCCGTGACTGCGGCCGACACCGCCGTGTACTACTGCGCACGCGCTGGAATTGC |
| | | CGCCCGGCTGAGGGGTGCCTTCGACATTTGGGGACAGGGCACCATGGTCACCG |
| | | TGTCCTCCGGCGGCGGAGGTTCCGGGGGTGGAGGCTCAGGAGGAGGGGGGTCC |
| | | GACATCGTCATGACTCAGTCGCCCTCAAGCGTCAGCGCGTCCGTCGGGGACAG |
| | | AGTGATCATCACCTGTCGGGCGTCCCAGGGAATTCGCAACTGGCTGGCCTGGT |
| | | ATCAGCAGAAGCCCGGAAAGGCCCCCAACCTGTTGATCTACGCCGCCTCAAAC |
| | | CTCCAATCCGGGGTGCCGAGCCGCTTCAGCGGCTCCGGTTCGGGTGCCGATTT |
| | | CACTCTGACCATCTCCTCCCTGCAACCTGAAGATGTGGCTACCTACTACTGCC |
| | | AAAAGTACAACTCCGCACCTTTTACTTTCGGACCGGGGACCAAAGTGGACATT |
| | | AAGACCACTACCCCAGCACCGAGGCCACCCACCCCGGCTCCTACCATCGCCTC |
| | | CCAGCCTCTGTCCCTGCGTCCGGAGGCATGTAGACCCGCAGCTGGTGGGGCCG |
| | | TGCATACCCGGGGTCTTGACTTCGCCTGCGATATCTACATTTGGGCCCCTCTG |
| | | GCTGGTACTTGCGGGGTCCTGCTGCTTTCACTCGTGATCACTCTTTACTGTAA |
| | | GCGCGGTCGGAAGAAGCTGCTGTACATCTTTAAGCAACCCTTCATGAGGCCTG |
| | | TGCAGACTACTCAAGAGGAGGACGGCTGTTCATGCCGGTTCCCAGAGGAGGAG |
| | | GAAGGCGGCTGCGAACTGCGCGTGAAATTCAGCCGCAGCGCAGATGCTCCAGC |
| | | CTACAAGCAGGGGCAGAACCAGCTCTACAACGAACTCAATCTTGGTCGGAGAG |
| | | AGGAGTACGACGTGCTGGACAAGCGGAGAGGACGGGACCCAGAAATGGGCGGG |
| | | AAGCCGCGCAGAAAGAATCCCCAAGAGGGCCTGTACAACGAGCTCCAAAAGGA |
| | | TAAGATGGCAGAAGCCTATAGCGAGATTGGTATGAAAGGGGAACGCAGAAGAG |
| | | GCAAAGGCCACGACGGACTGTACCAGGGACTCAGCACCGCCACCAAGGACACC |
| | | TATGACGCTCTTCACATGCAGGCCCTGCCGCCTCGG |

149368

| | | |
|---|---|---|
| 149368-aa | 135 | QVQLVQSGAEVKKPGSSVKVSCKASGGTFSSYAISWVRQAPGQGLEWMGGIIP |
| ScFv domain | | IFGTANYAQKFQGRVTITADESTSTAYMELSSLRSEDTAVYYCARRGGYQLLR |
| | | WDVGLLRSAFDIWGQGTMVTVSSGGGGSGGGGSGGGGSSYVLTQPPSVSVAPG |
| | | QTARITCGGNNIGSKSVHWYQQKPGQAPVLVLYGKNNRPSGVPDRFSGSRSGT |
| | | TASLTITGAQAEDEADYYCSSRDSSGDHLRVFGTGTKVTVL |
| 149368-nt | 156 | CAAGTGCAGCTGGTCCAGTCGGGCGCCGAGGTCAAGAAGCCCGGGAGCTCTGT |
| ScFv domain | | GAAAGTGTCCTGCAAGGCCTCCGGGGGCACCTTTAGCTCCTACGCCATCTCCT |
| | | GGGTCCGCCAAGCACCGGGTCAAGGCCTGGAGTGGATGGGGGGAATTATCCCT |
| | | ATCTTCGGCACTGCCAACTACGCCCAGAAGTTCCAGGGACGCGTGACCATTAC |
| | | CGCGGACGAATCCACCTCCACCGCTTATATGGAGCTGTCCAGCTTGCGCTCGG |
| | | AAGATACCGCCGTGTACTACTGCGCCCGGAGGGGTGGATACCAGCTGCTGAGA |
| | | TGGGACGTGGGCCTCCTGCGGTCGGCGTTCGACATCTGGGGCCAGGGCACTAT |
| | | GGTCACTGTGTCCAGCGGAGGAGGCGGATCGGGAGGCGGCGGATCAGGGGGAG |
| | | GCGGTTCCAGCTACGTGCTTACTCAACCCCCTTCGGTGTCCGTGGCCCCGGGA |
| | | CAGACCGCCAGAATCACTTGCGGAGGAAACAACATTGGGTCCAAGAGCGTGCA |
| | | TTGGTACCAGCAGAAGCCAGGACAGGCCCCTGTGCTGGTGCTCTACGGGAAGA |
| | | ACAATCGGCCCAGCGGAGTGCCGGACAGGTTCTCGGGTTCACGCTCCGGTACA |
| | | ACCGCTTCACTGACTATCACCGGGGCCCAGGCAGAGGATGAAGCGGACTACTA |
| | | CTGTTCCTCCCGGGATTCATCCGGCGACCACCTCCGGGTGTTCGGAACCGGAA |
| | | CGAAGGTCACCGTGCTG |
| 149368-aa | 177 | QVQLVQSGAEVKKPGSSVKVSCKASGGTFSSYAISWVRQAPGQGLEWMGGIIP |
| VH | | IFGTANYAQKFQGRVTITADESTSTAYMELSSLRSEDTAVYYCARRGGYQLLR |
| | | WDVGLLRSAFDIWGQGTMVTVSS |
| 149368-aa | 198 | SYVLTQPPSVSVAPGQTARITCGGNNIGSKSVHWYQQKPGQAPVLVLYGKNNR |
| VL | | PSGVPDRFSGSRSGTTASLTITGAQAEDEADYYCSSRDSSGDHLRVFGTGTKV |
| | | TVL |
| 149368-aa | 219 | MALPVTALLLPLALLLHAARPQVQLVQSGAEVKKPGSSVKVSCKASGGTFSSY |
| Full CAR | | AISWVRQAPGQGLEWMGGIIPIFGTANYAQKFQGRVTITADESTSTAYMELSS |
| | | LRSEDTAVYYCARRGGYQLLRWDVGLLRSAFDIWGQGTMVTVSSGGGGSGGGG |
| | | SGGGGSSYVLTQPPSVSVAPGQTARITCGGNNIGSKSVHWYQQKPGQAPVLVL |
| | | YGKNNRPSGVPDRFSGSRSGTTASLTITGAQAEDEADYYCSSRDSSGDHLRVF |
| | | GTGTKVTVLTTTPAPRPPTPAPTIASQPLSLRPEACRPAAGGAVHTRGLDFAC |
| | | DIYIWAPLAGTCGVLLLSLVITLYCKRGRKKLLYIFKQPFMRPVQTTQEEDGC |
| | | SCRFPEEEEGGCELRVKFSRSADAPAYKQGQNQLYNELNLGRREEYDVLDKRR |
| | | GRDPEMGGKPRRKNPQEGLYNELQKDKMAEAYSEIGMKGERRRGKGHDGLYQG |
| | | LSTATKDTYDALHMQALPPR |
| 149368-nt | 240 | ATGGCCCTCCCTGTCACCGCCCTGCTGCTTCCGCTGGCTCTTCTGCTCCACGC |
| Full CAR | | CGCTCGGCCCCAAGTGCAGCTGGTCCAGTCGGGCGCCGAGGTCAAGAAGCCCG |
| | | GGAGCTCTGTGAAAGTGTCCTGCAAGGCCTCCGGGGGCACCTTTAGCTCCTAC |
| | | GCCATCTCCTGGGTCCGCCAAGCACCGGGTCAAGGCCTGGAGTGGATGGGGGG |
| | | AATTATCCCTATCTTCGGCACTGCCAACTACGCCCAGAAGTTCCAGGGACGCG |
| | | TGACCATTACCGCGGACGAATCCACCTCCACCGCTTATATGGAGCTGTCCAGC |
| | | TTGCGCTCGGAAGATACCGCCGTGTACTACTGCGCCCGGAGGGGTGGATACCA |
| | | GCTGCTGAGATGGGACGTGGGCCTCCTGCGGTCGGCGTTCGACATCTGGGGCC |
| | | AGGGCACTATGGTCACTGTGTCCAGCGGAGGAGGCGGATCGGGAGGCGGCGGA |
| | | TCAGGGGGAGGCGGTTCCAGCTACGTGCTTACTCAACCCCCTTCGGTGTCCGT |
| | | GGCCCCGGGACAGACCGCCAGAATCACTTGCGGAGGAAACAACATTGGGTCCA |
| | | AGAGCGTGCATTGGTACCAGCAGAAGCCAGGACAGGCCCCTGTGCTGGTGCTC |
| | | TACGGGAAGAACAATCGGCCCAGCGGAGTGCCGGACAGGTTCTCGGGTTCACG |
| | | CTCCGGTACAACCGCTTCACTGACTATCACCGGGGCCCAGGCAGAGGATGAAG |
| | | CGGACTACTACTGTTCCTCCCGGGATTCATCCGGCGACCACCTCCGGGTGTTC |
| | | GGAACCGGAACGAAGGTCACCGTGCTGACCACTACCCCAGCACCGAGGCCACC |
| | | CACCCCGGCTCCTACCATCGCCTCCCAGCCTCTGTCCCTGCGTCCGGAGGCAT |
| | | GTAGACCCGCAGCTGGTGGGGCCGTGCATACCCGGGGTCTTGACTTCGCCTGC |
| | | GATATCTACATTTGGGCCCCTCTGGCTGGTACTTGCGGGGTCCTGCTGCTTTC |
| | | ACTCGTGATCACTCTTTACTGTAAGCGCGGTCGGAAGAAGCTGCTGTACATCT |
| | | TTAAGCAACCCTTCATGAGGCCTGTGCAGACTACTCAAGAGGAGGACGGCTGT |
| | | TCATGCCGGTTCCCAGAGGAGGAGGAAGGCGGCTGCGAACTGCGCGTGAAATT |
| | | CAGCCGCAGCGCAGATGCTCCAGCCTACAAGCAGGGGCAGAACCAGCTCTACA |
| | | ACGAACTCAATCTTGGTCGGAGAGAGGAGTACGACGTGCTGGACAAGCGGAGA |
| | | GGACGGGACCCAGAAATGGGCGGGAAGCCGCGCAGAAAGAATCCCCAAGAGGG |
| | | CCTGTACAACGAGCTCCAAAAGGATAAGATGGCAGAAGCCTATAGCGAGATTG |
| | | GTATGAAAGGGGAACGCAGAAGAGGCAAAGGCCACGACGGACTGTACCAGGGA |
| | | CTCAGCACCGCCACCAAGGACACCTATGACGCTCTTCACATGCAGGCCCTGCC |
| | | GCCTCGG |

149369

| | | |
|---|---|---|
| 149369-aa | 136 | EVQLQQSGPGLVKPSQTLSLTCAISGDSVSSNSAAWNWIRQSPSRGLEWLGRT |
| ScFv domain | | YYRSKWYSFYAISLKSRIIINPDTSKNQFSLQLKSVTPEDTAVYYCARSSPEG |
| | | LFLYWFDPWGQGTLVTVSSGGDGSGGGGSGGGGSSSELTQDPAVSVALGQTIR |
| | | ITCQGDSLGNYYATWYQQKPGQAPVLVIYGTNNRPSGIPDRFSASSSGNTASL |
| | | TITGAQAEDEADYYCNSRDSSGHHLLFGTGTKVTVL |
| 149369-nt | 157 | GAAGTGCAGCTCCAACAGTCAGGACCGGGGCTCGTGAAGCCATCCCAGACCCT |
| ScFv domain | | GTCCCTGACTTGTGCCATCTCGGGAGATAGCGTGTCATCGAACTCCGCCGCCT |
| | | GGAACTGGATTCGGCAGAGCCCGTCCCGCGGACTGGAGTGGCTTGGAAGGACC |
| | | TACTACCGGTCCAAGTGGTACTCTTTCTACGCGATCTCGCTGAAGTCCCGCAT |
| | | TATCATTAACCCTGATACCTCCAAGAATCAGTTCTCCCTCCAACTGAAATCCG |
| | | TCACCCCCGAGGACACAGCAGTGTATTACTGCGCACGGAGCAGCCCCGAAGGA |
| | | CTGTTCCTGTATTGGTTTGACCCCTGGGGCCAGGGGACTCTTGTGACCGTGTC |
| | | GAGCGGCGGAGATGGGTCCGGTGGCGGTGGTTCGGGGGGCGGCGGATCATCAT |
| | | CCGAACTGACCCAGGACCCGGCTGTGTCCGTGGCGCTGGGACAAACCATCCGC |
| | | ATTACGTGCCAGGGAGACTCCCTGGGCAACTACTACGCCACTTGGTACCAGCA |
| | | GAAGCCGGGCCAAGCCCCTGTGTTGGTCATCTACGGGACCAACAACAGACCTT |
| | | CCGGCATCCCCGACCGGTTCAGCGCTTCGTCCTCCGGCAACACTGCCAGCCTG |
| | | ACCATCACTGGAGCGCAGGCCGAAGATGAGGCCGACTACTACTGCAACAGCAG |
| | | AGACTCCTCGGGTCATCACCTCTTGTTCGGAACTGGAACCAAGGTCACCGTGC |
| | | TG |
| 149369-aa | 178 | EVQLQQSGPGLVKPSQTLSLTCAISGDSVSSNSAAWNWIRQSPSRGLEWLGRT |
| VH | | YYRSKWYSFYAISLKSRIIINPDTSKNQFSLQLKSVTPEDTAVYYCARSSPEG |
| | | LFLYWFDPWGQGTLVTVSS |
| 149369-aa | 199 | SSELTQDPAVSVALGQTIRITCQGDSLGNYYATWYQQKPGQAPVLVIYGTNNR |
| VL | | PSGIPDRFSASSSGNTASLTITGAQAEDEADYYCNSRDSSGHHLLFGTGTKVT |
| | | VL |
| 149369-aa | 220 | MALPVTALLLPLALLLHAARPEVQLQQSGPGLVKPSQTLSLTCAISGDSVSSN |
| Full CAR | | SAAWNWIRQSPSRGLEWLGRTYYRSKWYSFYAISLKSRIIINPDTSKNQFSLQ |
| | | LKSVTPEDTAVYYCARSSPEGLFLYWFDPWGQGTLVTVSSGGDGSGGGGSGGG |
| | | GSSSELTQDPAVSVALGQTIRITCQGDSLGNYYATWYQQKPGQAPVLVIYGTN |
| | | NRPSGIPDRFSASSSGNTASLTITGAQAEDEADYYCNSRDSSGHHLLFGTGTK |
| | | VTVLTTTPAPRPPTPAPTIASQPLSLRPEACRPAAGGAVHTRGLDFACDIYIW |
| | | APLAGTCGVLLLSLVITLYCKRGRKKLLYIFKQPFMRPVQTTQEEDGCSCRFP |
| | | EEEEGGCELRVKFSRSADAPAYKQGQNQLYNELNLGRREEYDVLDKRRGRDPE |
| | | MGGKPRRKNPQEGLYNELQKDKMAEAYSEIGMKGERRRGKGHDGLYQGLSTAT |
| | | KDTYDALHMQALPPR |
| 149369-nt | 241 | ATGGCCCTCCCTGTCACCGCCCTGCTGCTTCCGCTGGCTCTTCTGCTCCACGC |
| Full CAR | | CGCTCGGCCCGAAGTGCAGCTCCAACAGTCAGGACCGGGGCTCGTGAAGCCAT |
| | | CCCAGACCCTGTCCCTGACTTGTGCCATCTCGGGAGATAGCGTGTCATCGAAC |
| | | TCCGCCGCCTGGAACTGGATTCGGCAGAGCCCGTCCCGCGGACTGGAGTGGCT |
| | | TGGAAGGACCTACTACCGGTCCAAGTGGTACTCTTTCTACGCGATCTCGCTGA |
| | | AGTCCCGCATTATCATTAACCCTGATACCTCCAAGAATCAGTTCTCCCTCCAA |
| | | CTGAAATCCGTCACCCCCGAGGACACAGCAGTGTATTACTGCGCACGGAGCAG |
| | | CCCCGAAGGACTGTTCCTGTATTGGTTTGACCCCTGGGGCCAGGGGACTCTTG |
| | | TGACCGTGTCGAGCGGCGGAGATGGGTCCGGTGGCGGTGGTTCGGGGGGCGGC |
| | | GGATCATCATCCGAACTGACCCAGGACCCGGCTGTGTCCGTGGCGCTGGGACA |
| | | AACCATCCGCATTACGTGCCAGGGAGACTCCCTGGGCAACTACTACGCCACTT |
| | | GGTACCAGCAGAAGCCGGGCCAAGCCCCTGTGTTGGTCATCTACGGGACCAAC |
| | | AACAGACCTTCCGGCATCCCCGACCGGTTCAGCGCTTCGTCCTCCGGCAACAC |
| | | TGCCAGCCTGACCATCACTGGAGCGCAGGCCGAAGATGAGGCCGACTACTACT |
| | | GCAACAGCAGAGACTCCTCGGGTCATCACCTCTTGTTCGGAACTGGAACCAAG |
| | | GTCACCGTGCTGACCACTACCCCAGCACCGAGGCCACCCACCCCGGCTCCTAC |
| | | CATCGCCTCCCAGCCTCTGTCCCTGCGTCCGGAGGCATGTAGACCCGCAGCTG |
| | | GTGGGGCCGTGCATACCCGGGGTCTTGACTTCGCCTGCGATATCTACATTTGG |
| | | GCCCCTCTGGCTGGTACTTGCGGGGTCCTGCTGCTTTCACTCGTGATCACTCT |
| | | TTACTGTAAGCGCGGTCGGAAGAAGCTGCTGTACATCTTTAAGCAACCCTTCA |
| | | TGAGGCCTGTGCAGACTACTCAAGAGGAGGACGGCTGTTCATGCCGGTTCCCA |
| | | GAGGAGGAGGAAGGCGGCTGCGAACTGCGCGTGAAATTCAGCCGCAGCGCAGA |
| | | TGCTCCAGCCTACAAGCAGGGGCAGAACCAGCTCTACAACGAACTCAATCTTG |
| | | GTCGGAGAGAGGAGTACGACGTGCTGGACAAGCGGAGAGGACGGGACCCAGAA |
| | | ATGGGCGGGAAGCCGCGCAGAAAGAATCCCCAAGAGGGCCTGTACAACGAGCT |
| | | CCAAAAGGATAAGATGGCAGAAGCCTATAGCGAGATTGGTATGAAAGGGGAAC |
| | | GCAGAAGAGGCAAAGGCCACGACGGACTGTACCAGGGACTCAGCACCGCCACC |
| | | AAGGACACCTATGACGCTCTTCACATGCAGGCCCTGCCGCCTCGG |

BCMA_EBB-C1978-A4

| | | |
|---|---|---|
| BCMA_EBB- | 137 | EVQLVESGGGLVQPGGSLRLSCAASGFTFSSYAMSWVRQAPGKGLEWVSAISG |
| C1978-A4- | | SGGSTYYADSVKGRFTISRDNSKNTLYLQMNSLRAEDTAVYYCAKVEGSGSLD |
| aa | | YWGQGTLVTVSSGGGGSGGGGSGGGGSEIVMTQSPGTLSLSPGERATLSCRAS |
| ScFv domain | | QSVSSAYLAWYQQKPGQPPRLLISGASTRATGIPDRFGGSGSGTDFTLTISRL |
| | | EPEDFAVYYCQHYGSSFNGSSLFTFGQGTRLEIK |
| BCMA_EBB- | 158 | GAAGTGCAGCTCGTGGAGTCAGGAGGCGGCCTGGTCCAGCCGGGAGGGTCCCT |
| C1978-A4-nt | | TAGACTGTCATGCGCCGCAAGCGGATTCACTTTCTCCTCCTATGCCATGAGCT |
| ScFv domain | | GGGTCCGCCAAGCCCCCGGAAAGGGACTGGAATGGGTGTCCGCCATCTCGGGG |
| | | TCTGGAGGCTCAACTTACTACGCTGACTCCGTGAAGGGACGGTTCACCATTAG |
| | | CCGCGACAACTCCAAGAACACCCTCTACCTCCAAATGAACTCCCTGCGGGCCG |
| | | AGGATACCGCCGTCTACTACTGCGCCAAAGTGGAAGGTTCAGGATCGCTGGAC |
| | | TACTGGGGACAGGGTACTCTCGTGACCGTGTCATCGGGCGGAGGAGGTTCCGG |
| | | CGGTGGCGGCTCCGGCGGCGGAGGGTCGGAGATCGTGATGACCCAGAGCCCTG |
| | | GTACTCTGAGCCTTTCGCCGGGAGAAAGGGCCACCCTGTCCTGCCGCGCTTCC |
| | | CAATCCGTGTCCTCCGCGTACTTGGCGTGGTACCAGCAGAAGCCGGGACAGCC |
| | | CCCTCGGCTGCTGATCAGCGGGGCCAGCACCCGGGCAACCGGAATCCCAGACA |
| | | GATTCGGGGGTTCCGGCAGCGGCACAGATTTCACCCTGACTATTTCGAGGTTG |
| | | GAGCCCGAGGACTTTGCGGTGTATTACTGTCAGCACTACGGGTCGTCCTTTAA |
| | | TGGCTCCAGCCTGTTCACGTTCGGACAGGGGACCCGCCTGGAAATCAAG |
| BCMA_EBB- | 179 | EVQLVESGGGLVQPGGSLRLSCAASGFTFSSYAMSWVRQAPGKGLEWVSAISG |
| C1978-A4- | | SGGSTYYADSVKGRFTISRDNSKNTLYLQMNSLRAEDTAVYYCAKVEGSGSLD |
| aa | | YWGQGTLVTVSS |
| VH | | |
| BCMA_EBB- | 200 | EIVMTQSPGTLSLSPGERATLSCRASQSVSSAYLAWYQQKPGQPPRLLISGAS |
| C1978-A4- | | TRATGIPDRFGGSGSGTDFTLTISRLEPEDFAVYYCQHYGSSFNGSSLFTFGQ |
| aa | | GTRLEIK |
| VL | | |
| BCMA_EBB- | 221 | MALPVTALLLPLALLLHAARPEVQLVESGGGLVQPGGSLRLSCAASGFTFSSY |
| C1978-A4- | | AMSWVRQAPGKGLEWVSAISGSGGSTYYADSVKGRFTISRDNSKNTLYLQMNS |
| aa | | LRAEDTAVYYCAKVEGSGSLDYWGQGTLVTVSSGGGGSGGGGSGGGGSEIVMT |
| Full CART | | QSPGTLSLSPGERATLSCRASQSVSSAYLAWYQQKPGQPPRLLISGASTRATG |
| | | IPDRFGGSGSGTDFTLTISRLEPEDFAVYYCQHYGSSFNGSSLFTFGQGTRLE |
| | | IKTTTPAPRPPTPAPTIASQPLSLRPEACRPAAGGAVHTRGLDFACDIYIWAP |
| | | LAGTCGVLLLSLVITLYCKRGRKKLLYIFKQPFMRPVQTTQEEDGCSCRFPEE |
| | | EEGGCELRVKFSRSADAPAYKQGQNQLYNELNLGRREEYDVLDKRRGRDPEMG |
| | | GKPRRKNPQEGLYNELQKDKMAEAYSEIGMKGERRRGKGHDGLYQGLSTATKD |
| | | TYDALHMQALPPR |
| BCMA_EBB- | 242 | ATGGCCCTCCCTGTCACCGCCCTGCTGCTTCCGCTGGCTCTTCTGCTCCACGC |
| C1978-A4-nt | | CGCTCGGCCCGAAGTGCAGCTCGTGGAGTCAGGAGGCGGCCTGGTCCAGCCGG |
| Full CART | | GAGGGTCCCTTAGACTGTCATGCGCCGCAAGCGGATTCACTTTCTCCTCCTAT |
| | | GCCATGAGCTGGGTCCGCCAAGCCCCCGGAAAGGGACTGGAATGGGTGTCCGC |
| | | CATCTCGGGGTCTGGAGGCTCAACTTACTACGCTGACTCCGTGAAGGGACGGT |
| | | TCACCATTAGCCGCGACAACTCCAAGAACACCCTCTACCTCCAAATGAACTCC |
| | | CTGCGGGCCGAGGATACCGCCGTCTACTACTGCGCCAAAGTGGAAGGTTCAGG |
| | | ATCGCTGGACTACTGGGGACAGGGTACTCTCGTGACCGTGTCATCGGGCGGAG |
| | | GAGGTTCCGGCGGTGGCGGCTCCGGCGGCGGAGGGTCGGAGATCGTGATGACC |
| | | CAGAGCCCTGGTACTCTGAGCCTTTCGCCGGGAGAAAGGGCCACCCTGTCCTG |
| | | CCGCGCTTCCCAATCCGTGTCCTCCGCGTACTTGGCGTGGTACCAGCAGAAGC |
| | | CGGGACAGCCCCCTCGGCTGCTGATCAGCGGGGCCAGCACCCGGGCAACCGGA |
| | | ATCCCAGACAGATTCGGGGGTTCCGGCAGCGGCACAGATTTCACCCTGACTAT |
| | | TTCGAGGTTGGAGCCCGAGGACTTTGCGGTGTATTACTGTCAGCACTACGGGT |
| | | CGTCCTTTAATGGCTCCAGCCTGTTCACGTTCGGACAGGGGACCCGCCTGGAA |
| | | ATCAAGACCACTACCCCAGCACCGAGGCCACCCACCCCGGCTCCTACCATCGC |
| | | CTCCCAGCCTCTGTCCCTGCGTCCGGAGGCATGTAGACCCGCAGCTGGTGGGG |
| | | CCGTGCATACCCGGGGTCTTGACTTCGCCTGCGATATCTACATTTGGGCCCCT |
| | | CTGGCTGGTACTTGCGGGGTCCTGCTGCTTTCACTCGTGATCACTCTTTACTG |
| | | TAAGCGCGGTCGGAAGAAGCTGCTGTACATCTTTAAGCAACCCTTCATGAGGC |
| | | CTGTGCAGACTACTCAAGAGGAGGACGGCTGTTCATGCCGGTTCCCAGAGGAG |
| | | GAGGAAGGCGGCTGCGAACTGCGCGTGAAATTCAGCCGCAGCGCAGATGCTCC |
| | | AGCCTACAAGCAGGGGCAGAACCAGCTCTACAACGAACTCAATCTTGGTCGGA |
| | | GAGAGGAGTACGACGTGCTGGACAAGCGGAGAGGACGGGACCCAGAAATGGGC |
| | | GGGAAGCCGCGCAGAAAGAATCCCCAAGAGGGCCTGTACAACGAGCTCCAAAA |
| | | GGATAAGATGGCAGAAGCCTATAGCGAGATTGGTATGAAAGGGGAACGCAGAA |
| | | GAGGCAAAGGCCACGACGGACTGTACCAGGGACTCAGCACCGCCACCAAGGAC |
| | | ACCTATGACGCTCTTCACATGCAGGCCCTGCCGCCTCGG |

BCMA_EBB-C1978-G1

| | | |
|---|---|---|
| BCMA_EBB- | 138 | EVQLVETGGGLVQPGGSLRLSCAASGITFSRYPMSWVRQAPGKGLEWVSGISD |
| C1978-G1- | | SGVSTYYADSAKGRFTISRDNSKNTLFLQMSSLRDEDTAVYYCVTRAGSEASD |
| aa | | IWGQGTMVTVSSGGGGSGGGGSGGGGSEIVLTQSPATLSLSPGERATLSCRAS |
| ScFv domain | | QSVSNSLAWYQQKPGQAPRLLIYDASSRATGIPDRFSGSGSGTDFTLTISRLE |
| | | PEDFAIYYCQQFGTSSGLTFGGGTKLEIK |
| BCMA_EBB- | 159 | GAAGTGCAACTGGTGGAAACCGGTGGCGGCCTGGTGCAGCCTGGAGGATCATT |
| C1978-G1- | | GAGGCTGTCATGCGCGGCCAGCGGTATTACCTTCTCCCGGTACCCCATGTCCT |
| nt | | GGGTCAGACAGGCCCCGGGGAAAGGGCTTGAATGGGTGTCCGGGATCTCGGAC |
| ScFv domain | | TCCGGTGTCAGCACTTACTACGCCGACTCCGCCAAGGGACGCTTCACCATTTC |
| | | CCGGGACAACTCGAAGAACACCCTGTTCCTCCAAATGAGCTCCCTCCGGGACG |
| | | AGGATACTGCAGTGTACTACTGCGTGACCCGCGCCGGGTCCGAGGCGTCTGAC |
| | | ATTTGGGGACAGGGCACTATGGTCACCGTGTCGTCCGGCGGAGGGGGCTCGGG |
| | | AGGCGGTGGCAGCGGAGGAGGAGGGTCCGAGATCGTGCTGACCCAATCCCCGG |
| | | CCACCCTCTCGCTGAGCCCTGGAGAAAGGGCAACCTTGTCCTGTCGCGCGAGC |
| | | CAGTCCGTGAGCAACTCCCTGGCCTGGTACCAGCAGAAGCCCGGACAGGCTCC |
| | | GAGACTTCTGATCTACGACGCTTCGAGCCGGGCCACTGGAATCCCCGACCGCT |
| | | TTTCGGGGTCCGGCTCAGGAACCGATTTCACCCTGACAATCTCACGGCTGGAG |
| | | CCAGAGGATTTCGCCATCTATTACTGCCAGCAGTTCGGTACTTCCTCCGGCCT |
| | | GACTTTCGGAGGCGGCACGAAGCTCGAAATCAAG |
| BCMA_EBB- | 180 | EVQLVETGGGLVQPGGSLRLSCAASGITFSRYPMSWVRQAPGKGLEWVSGISD |
| C1978-G1- | | SGVSTYYADSAKGRFTISRDNSKNTLFLQMSSLRDEDTAVYYCVTRAGSEASD |
| aa | | IWGQGTMVTVSS |
| VH | | |
| BCMA_EBB- | 201 | EIVLTQSPATLSLSPGERATLSCRASQSVSNSLAWYQQKPGQAPRLLIYDASS |
| C1978-G1- | | RATGIPDRFSGSGSGTDFTLTISRLEPEDFAIYYCQQFGTSSGLTFGGGTKLE |
| aa | | IK |
| VL | | |
| BCMA_EBB- | 222 | MALPVTALLLPLALLLHAARPEVQLVETGGGLVQPGGSLRLSCAASGITFSRY |
| C1978-G1- | | PMSWVRQAPGKGLEWVSGISDSGVSTYYADSAKGRFTISRDNSKNTLFLQMSS |
| aa | | LRDEDTAVYYCVTRAGSEASDIWGQGTMVTVSSGGGGSGGGGSGGGGSEIVLT |
| Full CART | | QSPATLSLSPGERATLSCRASQSVSNSLAWYQQKPGQAPRLLIYDASSRATGI |
| | | PDRFSGSGSGTDFTLTISRLEPEDFAIYYCQQFGTSSGLTFGGGTKLEIKTTT |
| | | PAPRPPTPAPTIASQPLSLRPEACRPAAGGAVHTRGLDFACDIYIWAPLAGTC |
| | | GVLLLSLVITLYCKRGRKKLLYIFKQPFMRPVQTTQEEDGCSCRFPEEEEGGC |
| | | ELRVKFSRSADAPAYKQGQNQLYNELNLGRREEYDVLDKRRGRDPEMGGKPRR |
| | | KNPQEGLYNELQKDKMAEAYSEIGMKGERRRGKGHDGLYQGLSTATKDTYDAL |
| | | HMQALPPR |
| BCMA_EBB- | 243 | ATGGCCCTCCCTGTCACCGCCCTGCTGCTTCCGCTGGCTCTTCTGCTCCACGC |
| C1978-G1- | | CGCTCGGCCCGAAGTGCAACTGGTGGAAACCGGTGGCGGCCTGGTGCAGCCTG |
| nt | | GAGGATCATTGAGGCTGTCATGCGCGGCCAGCGGTATTACCTTCTCCCGGTAC |
| Full CART | | CCCATGTCCTGGGTCAGACAGGCCCCGGGGAAAGGGCTTGAATGGGTGTCCGG |
| | | GATCTCGGACTCCGGTGTCAGCACTTACTACGCCGACTCCGCCAAGGGACGCT |
| | | TCACCATTTCCCGGGACAACTCGAAGAACACCCTGTTCCTCCAAATGAGCTCC |
| | | CTCCGGGACGAGGATACTGCAGTGTACTACTGCGTGACCCGCGCCGGGTCCGA |
| | | GGCGTCTGACATTTGGGGACAGGGCACTATGGTCACCGTGTCGTCCGGCGGAG |
| | | GGGGCTCGGGAGGCGGTGGCAGCGGAGGAGGAGGGTCCGAGATCGTGCTGACC |
| | | CAATCCCCGGCCACCCTCTCGCTGAGCCCTGGAGAAAGGGCAACCTTGTCCTG |
| | | TCGCGCGAGCCAGTCCGTGAGCAACTCCCTGGCCTGGTACCAGCAGAAGCCCG |
| | | GACAGGCTCCGAGACTTCTGATCTACGACGCTTCGAGCCGGGCCACTGGAATC |
| | | CCCGACCGCTTTTCGGGGTCCGGCTCAGGAACCGATTTCACCCTGACAATCTC |
| | | ACGGCTGGAGCCAGAGGATTTCGCCATCTATTACTGCCAGCAGTTCGGTACTT |
| | | CCTCCGGCCTGACTTTCGGAGGCGGCACGAAGCTCGAAATCAAGACCACTACC |
| | | CCAGCACCGAGGCCACCCACCCCGGCTCCTACCATCGCCTCCCAGCCTCTGTC |
| | | CCTGCGTCCGGAGGCATGTAGACCCGCAGCTGGTGGGGCCGTGCATACCCGGG |
| | | GTCTTGACTTCGCCTGCGATATCTACATTTGGGCCCCTCTGGCTGGTACTTGC |
| | | GGGGTCCTGCTGCTTTCACTCGTGATCACTCTTTACTGTAAGCGCGGTCGGAA |
| | | GAAGCTGCTGTACATCTTTAAGCAACCCTTCATGAGGCCTGTGCAGACTACTC |
| | | AAGAGGAGGACGGCTGTTCATGCCGGTTCCCAGAGGAGGAGGAAGGCGGCTGC |
| | | GAACTGCGCGTGAAATTCAGCCGCAGCGCAGATGCTCCAGCCTACAAGCAGGG |
| | | GCAGAACCAGCTCTACAACGAACTCAATCTTGGTCGGAGAGAGGAGTACGACG |
| | | TGCTGGACAAGCGGAGAGGACGGGACCCAGAAATGGGCGGGAAGCCGCGCAGA |
| | | AAGAATCCCCAAGAGGGCCTGTACAACGAGCTCCAAAAGGATAAGATGGCAGA |
| | | AGCCTATAGCGAGATTGGTATGAAAGGGGAACGCAGAAGAGGCAAAGGCCACG |
| | | ACGGACTGTACCAGGGACTCAGCACCGCCACCAAGGACACCTATGACGCTCTT |
| | | CACATGCAGGCCCTGCCGCCTCGG |

BCMA_EBB-C1979-C1

| | | |
|---|---|---|
| BCMA_EBB- | 139 | QVQLVESGGGLVQPGGSLRLSCAASGFTFSSYAMSWVRQAPGKGLEWVSAISG |
| C1979-C1- | | SGGSTYYADSVKGRFTISRDNAKNSLYLQMNSLRAEDTAIYYCARATYKRELR |
| aa | | YYYGMDVWGQGTMVTVSSGGGGSGGGGSGGGGSEIVMTQSPGTVSLSPGERAT |
| ScFv domain | | LSCRASQSVSSSFLAWYQQKPGQAPRLLIYGASSRATGIPDRFSGSGSGTDFT |
| | | LTISRLEPEDSAVYYCQQYHSSPSWTFGQGTRLEIK |
| BCMA_EBB- | 160 | CAAGTGCAGCTCGTGGAATCGGGTGGCGGACTGGTGCAGCCGGGGGGCTCACT |
| C1979-C1-nt | | TAGACTGTCCTGCGCGGCCAGCGGATTCACTTTCTCCTCCTACGCCATGTCCT |
| ScFv domain | | GGGTCAGACAGGCCCCTGGAAAGGGCCTGGAATGGGTGTCCGCAATCAGCGGC |
| | | AGCGGCGGCTCGACCTATTACGCGGATTCAGTGAAGGGCAGATTCACCATTTC |
| | | CCGGGACAACGCCAAGAACTCCTTGTACCTTCAAATGAACTCCCTCCGCGCGG |
| | | AAGATACCGCAATCTACTACTGCGCTCGGGCCACTTACAAGAGGGAACTGCGC |
| | | TACTACTACGGGATGGACGTCTGGGGCCAGGGAACCATGGTCACCGTGTCCAG |
| | | CGGAGGAGGAGGATCGGGAGGAGGCGGTAGCGGGGGTGGAGGGTCGGAGATCG |
| | | TGATGACCCAGTCCCCCGGCACTGTGTCGCTGTCCCCCGGCGAACGGGCCACC |
| | | CTGTCATGTCGGGCCAGCCAGTCAGTGTCGTCAAGCTTCCTCGCCTGGTACCA |
| | | GCAGAAACCGGGACAAGCTCCCCGCCTGCTGATCTACGGAGCCAGCAGCCGGG |
| | | CCACCGGTATTCCTGACCGGTTCTCCGGTTCGGGGTCCGGGACCGACTTTACT |
| | | CTGACTATCTCTCGCCTCGAGCCAGAGGACTCCGCCGTGTATTACTGCCAGCA |
| | | GTACCACTCCTCCCCGTCCTGGACGTTCGGACAGGGCACAAGGCTGGAGATTA |
| | | AG |
| BCMA_EBB- | 181 | QVQLVESGGGLVQPGGSLRLSCAASGFTFSSYAMSWVRQAPGKGLEWVSAISG |
| C1979-C1- | | SGGSTYYADSVKGRFTISRDNAKNSLYLQMNSLRAEDTAIYYCARATYKRELR |
| aa | | YYYGMDVWGQGTMVTVSS |
| VH | | |
| BCMA_EBB- | 202 | EIVMTQSPGTVSLSPGERATLSCRASQSVSSSFLAWYQQKPGQAPRLLIYGAS |
| C1979-C1- | | SRATGIPDRFSGSGSGTDFTLTISRLEPEDSAVYYCQQYHSSPSWTFGQGTRL |
| aa | | EIK |
| VL | | |
| BCMA_EBB- | 223 | MALPVTALLLPLALLLHAARPQVQLVESGGGLVQPGGSLRLSCAASGFTFSSY |
| C1979-C1- | | AMSWVRQAPGKGLEWVSAISGSGGSTYYADSVKGRFTISRDNAKNSLYLQMNS |
| aa | | LRAEDTAIYYCARATYKRELRYYYGMDVWGQGTMVTVSSGGGGSGGGGSGGGG |
| Full CART | | SEIVMTQSPGTVSLSPGERATLSCRASQSVSSSFLAWYQQKPGQAPRLLIYGA |
| | | SSRATGIPDRFSGSGSGTDFTLTISRLEPEDSAVYYCQQYHSSPSWTFGQGTR |
| | | LEIKTTTPAPRPPTPAPTIASQPLSLRPEACRPAAGGAVHTRGLDFACDIYIW |
| | | APLAGTCGVLLLSLVITLYCKRGRKKLLYIFKQPFMRPVQTTQEEDGCSCRFP |
| | | EEEEGGCELRVKFSRSADAPAYKQGQNQLYNELNLGRREEYDVLDKRRGRDPE |
| | | MGGKPRRKNPQEGLYNELQKDKMAEAYSEIGMKGERRRGKGHDGLYQGLSTAT |
| | | KDTYDALHMQALPPR |
| BCMA_EBB- | 244 | ATGGCCCTCCCTGTCACCGCCCTGCTGCTTCCGCTGGCTCTTCTGCTCCACGC |
| C1979-C1-nt | | CGCTCGGCCCCAAGTGCAGCTCGTGGAATCGGGTGGCGGACTGGTGCAGCCGG |
| Full CART | | GGGGCTCACTTAGACTGTCCTGCGCGGCCAGCGGATTCACTTTCTCCTCCTAC |
| | | GCCATGTCCTGGGTCAGACAGGCCCCTGGAAAGGGCCTGGAATGGGTGTCCGC |
| | | AATCAGCGGCAGCGGCGGCTCGACCTATTACGCGGATTCAGTGAAGGGCAGAT |
| | | TCACCATTTCCCGGGACAACGCCAAGAACTCCTTGTACCTTCAAATGAACTCC |
| | | CTCCGCGCGGAAGATACCGCAATCTACTACTGCGCTCGGGCCACTTACAAGAG |
| | | GGAACTGCGCTACTACTACGGGATGGACGTCTGGGGCCAGGGAACCATGGTCA |
| | | CCGTGTCCAGCGGAGGAGGAGGATCGGGAGGAGGCGGTAGCGGGGGTGGAGGG |
| | | TCGGAGATCGTGATGACCCAGTCCCCCGGCACTGTGTCGCTGTCCCCCGGCGA |
| | | ACGGGCCACCCTGTCATGTCGGGCCAGCCAGTCAGTGTCGTCAAGCTTCCTCG |
| | | CCTGGTACCAGCAGAAACCGGGACAAGCTCCCCGCCTGCTGATCTACGGAGCC |
| | | AGCAGCCGGGCCACCGGTATTCCTGACCGGTTCTCCGGTTCGGGGTCCGGGAC |
| | | CGACTTTACTCTGACTATCTCTCGCCTCGAGCCAGAGGACTCCGCCGTGTATT |
| | | ACTGCCAGCAGTACCACTCCTCCCCGTCCTGGACGTTCGGACAGGGCACAAGG |
| | | CTGGAGATTAAGACCACTACCCCAGCACCGAGGCCACCCACCCCGGCTCCTAC |
| | | CATCGCCTCCCAGCCTCTGTCCCTGCGTCCGGAGGCATGTAGACCCGCAGCTG |
| | | GTGGGGCCGTGCATACCCGGGGTCTTGACTTCGCCTGCGATATCTACATTTGG |
| | | GCCCCTCTGGCTGGTACTTGCGGGGTCCTGCTGCTTTCACTCGTGATCACTCT |
| | | TTACTGTAAGCGCGGTCGGAAGAAGCTGCTGTACATCTTTAAGCAACCCTTCA |
| | | TGAGGCCTGTGCAGACTACTCAAGAGGAGGACGGCTGTTCATGCCGGTTCCCA |
| | | GAGGAGGAGGAAGGCGGCTGCGAACTGCGCGTGAAATTCAGCCGCAGCGCAGA |
| | | TGCTCCAGCCTACAAGCAGGGGCAGAACCAGCTCTACAACGAACTCAATCTTG |
| | | GTCGGAGAGAGGAGTACGACGTGCTGGACAAGCGGAGAGGACGGGACCCAGAA |
| | | ATGGGCGGGAAGCCGCGCAGAAAGAATCCCCAAGAGGGCCTGTACAACGAGCT |
| | | CCAAAAGGATAAGATGGCAGAAGCCTATAGCGAGATTGGTATGAAAGGGGAAC |
| | | GCAGAAGAGGCAAAGGCCACGACGGACTGTACCAGGGACTCAGCACCGCCACC |
| | | AAGGACACCTATGACGCTCTTCACATGCAGGCCCTGCCGCCTCGG |

BCMA_EBB-C1978-C7

| | | |
|---|---|---|
| BCMA_EBB- | 140 | EVQLVETGGGLVQPGGSLRLSCAASGFTFSSYAMSWVRQAPGKGLEWVSAISG |
| C1978-C7- | | SGGSTYYADSVKGRFTISRDNSKNTLYLQMNTLKAEDTAVYYCARATYKRELR |
| aa | | YYYGMDVWGQGTTVTVSSGGGGSGGGGSGGGGSEIVLTQSPSTLSLSPGESAT |
| ScFv domain | | LSCRASQSVSTTFLAWYQQKPGQAPRLLIYGSSNRATGIPDRFSGSGSGTDFT |
| | | LTIRRLEPEDFAVYYCQQYHSSPSWTFGQGTKVEIK |
| BCMA_EBB- | 161 | GAGGTGCAGCTTGTGGAAACCGGTGGCGGACTGGTGCAGCCCGGAGGAAGCCT |
| C1978-C7-nt | | CAGGCTGTCCTGCGCCGCGTCCGGCTTCACCTTCTCCTCGTACGCCATGTCCT |
| ScFv domain | | GGGTCCGCCAGGCCCCCGGAAAGGGCCTGGAATGGGTGTCCGCCATCTCTGGA |
| | | AGCGGAGGTTCCACGTACTACGCGGACAGCGTCAAGGGAAGGTTCACAATCTC |
| | | CCGCGATAATTCGAAGAACACTCTGTACCTTCAAATGAACACCCTGAAGGCCG |
| | | AGGACACTGCTGTGTACTACTGCGCACGGGCCACCTACAAGAGAGAGCTCCGG |
| | | TACTACTACGGAATGGACGTCTGGGGCCAGGGAACTACTGTGACCGTGTCCTC |
| | | GGGAGGGGGTGGCTCCGGGGGGGGCGGCTCCGGCGGAGGCGGTTCCGAGATTG |
| | | TGCTGACCCAGTCACCTTCAACTCTGTCGCTGTCCCCGGGAGAGAGCGCTACT |
| | | CTGAGCTGCCGGGCCAGCCAGTCCGTGTCCACCACCTTCCTCGCCTGGTATCA |
| | | GCAGAAGCCGGGGCAGGCACCACGGCTCTTGATCTACGGGTCAAGCAACAGAG |
| | | CGACCGGAATTCCTGACCGCTTCTCGGGGAGCGGTTCAGGCACCGACTTCACC |
| | | CTGACTATCCGGCGCCTGGAACCCGAAGATTTCGCCGTGTATTACTGTCAACA |
| | | GTACCACTCCTCGCCGTCCTGGACCTTTGGCCAAGGAACCAAAGTGGAAATCA |
| | | AG |
| BCMA_EBB- | 182 | EVQLVETGGGLVQPGGSLRLSCAASGFTFSSYAMSWVRQAPGKGLEWVSAISG |
| C1978-C7- | | SGGSTYYADSVKGRFTISRDNSKNTLYLQMNTLKAEDTAVYYCARATYKRELR |
| aa | | YYYGMDVWGQGTTVTVSS |
| VH | | |
| BCMA_EBB- | 203 | EIVLTQSPSTLSLSPGESATLSCRASQSVSTTFLAWYQQKPGQAPRLLIYGSS |
| C1978-C7- | | NRATGIPDRFSGSGSGTDFTLTIRRLEPEDFAVYYCQQYHSSPSWTFGQGTKV |
| aa | | EIK |
| VL | | |
| BCMA_EBB- | 224 | MALPVTALLLPLALLLHAARPEVQLVETGGGLVQPGGSLRLSCAASGFTFSSY |
| C1978-C7- | | AMSWVRQAPGKGLEWVSAISGSGGSTYYADSVKGRFTISRDNSKNTLYLQMNT |
| aa | | LKAEDTAVYYCARATYKRELRYYYGMDVWGQGTTVTVSSGGGGSGGGGSGGGG |
| Full CART | | SEIVLTQSPSTLSLSPGESATLSCRASQSVSTTFLAWYQQKPGQAPRLLIYGS |
| | | SNRATGIPDRFSGSGSGTDFTLTIRRLEPEDFAVYYCQQYHSSPSWTFGQGTK |
| | | VEIKTTTPAPRPPTPAPTIASQPLSLRPEACRPAAGGAVHTRGLDFACDIYIW |
| | | APLAGTCGVLLLSLVITLYCKRGRKKLLYIFKQPFMRPVQTTQEEDGCSCRFP |
| | | EEEEGGCELRVKFSRSADAPAYKQGQNQLYNELNLGRREEYDVLDKRRGRDPE |
| | | MGGKPRRKNPQEGLYNELQKDKMAEAYSEIGMKGERRRGKGHDGLYQGLSTAT |
| | | KDTYDALHMQALPPR |
| BCMA_EBB- | 245 | ATGGCCCTCCCTGTCACCGCCCTGCTGCTTCCGCTGGCTCTTCTGCTCCACGC |
| C1978-C7-nt | | CGCTCGGCCCGAGGTGCAGCTTGTGGAAACCGGTGGCGGACTGGTGCAGCCCG |
| Full CART | | GAGGAAGCCTCAGGCTGTCCTGCGCCGCGTCCGGCTTCACCTTCTCCTCGTAC |
| | | GCCATGTCCTGGGTCCGCCAGGCCCCCGGAAAGGGCCTGGAATGGGTGTCCGC |
| | | CATCTCTGGAAGCGGAGGTTCCACGTACTACGCGGACAGCGTCAAGGGAAGGT |
| | | TCACAATCTCCCGCGATAATTCGAAGAACACTCTGTACCTTCAAATGAACACC |
| | | CTGAAGGCCGAGGACACTGCTGTGTACTACTGCGCACGGGCCACCTACAAGAG |
| | | AGAGCTCCGGTACTACTACGGAATGGACGTCTGGGGCCAGGGAACTACTGTGA |
| | | CCGTGTCCTCGGGAGGGGGTGGCTCCGGGGGGGGCGGCTCCGGCGGAGGCGGT |
| | | TCCGAGATTGTGCTGACCCAGTCACCTTCAACTCTGTCGCTGTCCCCGGGAGA |
| | | GAGCGCTACTCTGAGCTGCCGGGCCAGCCAGTCCGTGTCCACCACCTTCCTCG |
| | | CCTGGTATCAGCAGAAGCCGGGGCAGGCACCACGGCTCTTGATCTACGGGTCA |
| | | AGCAACAGAGCGACCGGAATTCCTGACCGCTTCTCGGGGAGCGGTTCAGGCAC |
| | | CGACTTCACCCTGACTATCCGGCGCCTGGAACCCGAAGATTTCGCCGTGTATT |
| | | ACTGTCAACAGTACCACTCCTCGCCGTCCTGGACCTTTGGCCAAGGAACCAAA |
| | | GTGGAAATCAAGACCACTACCCCAGCACCGAGGCCACCCACCCCGGCTCCTAC |
| | | CATCGCCTCCCAGCCTCTGTCCCTGCGTCCGGAGGCATGTAGACCCGCAGCTG |
| | | GTGGGGCCGTGCATACCCGGGGTCTTGACTTCGCCTGCGATATCTACATTTGG |
| | | GCCCCTCTGGCTGGTACTTGCGGGGTCCTGCTGCTTTCACTCGTGATCACTCT |
| | | TTACTGTAAGCGCGGTCGGAAGAAGCTGCTGTACATCTTTAAGCAACCCTTCA |
| | | TGAGGCCTGTGCAGACTACTCAAGAGGAGGACGGCTGTTCATGCCGGTTCCCA |
| | | GAGGAGGAGGAAGGCGGCTGCGAACTGCGCGTGAAATTCAGCCGCAGCGCAGA |
| | | TGCTCCAGCCTACAAGCAGGGGCAGAACCAGCTCTACAACGAACTCAATCTTG |
| | | GTCGGAGAGAGGAGTACGACGTGCTGGACAAGCGGAGAGGACGGGACCCAGAA |
| | | ATGGGCGGGAAGCCGCGCAGAAAGAATCCCCAAGAGGGCCTGTACAACGAGCT |
| | | CCAAAAGGATAAGATGGCAGAAGCCTATAGCGAGATTGGTATGAAAGGGGAAC |
| | | GCAGAAGAGGCAAAGGCCACGACGGACTGTACCAGGGACTCAGCACCGCCACC |
| | | AAGGACACCTATGACGCTCTTCACATGCAGGCCCTGCCGCCTCGG |

BCMA_EBB-C1978-D10

| | | |
|---|---|---|
| BCMA_EBB- | 141 | EVQLVETGGGLVQPGRSLRLSCAASGFTFDDYAMHWVRQAPGKGLEWVSGISW |
| C1978-D10- | | NSGSIGYADSVKGRFTISRDNAKNSLYLQMNSLRDEDTAVYYCARVGKAVPDV |
| aa | | WGQGTTVTVSSGGGGSGGGGSGGGGSDIVMTQTPSSLSASVGDRVTITCRASQ |
| ScFv domain | | SISSYLNWYQQKPGKAPKLLIYAASSLQSGVPSRFSGSGSGTDFTLTISSLQP |
| | | EDFATYYCQQSYSTPYSFGQGTRLEIK |
| BCMA_EBB- | 162 | GAAGTGCAGCTCGTGGAAACTGGAGGTGGACTCGTGCAGCCTGGACGGTCGCT |
| C1978-D10- | | GCGGCTGAGCTGCGCTGCATCCGGCTTCACCTTCGACGATTATGCCATGCACT |
| nt | | GGGTCAGACAGGCGCCAGGGAAGGGACTTGAGTGGGTGTCCGGTATCAGCTGG |
| ScFv domain | | AATAGCGGCTCAATCGGATACGCGGACTCCGTGAAGGGAAGGTTCACCATTTC |
| | | CCGCGACAACGCCAAGAACTCCCTGTACTTGCAAATGAACAGCCTCCGGGATG |
| | | AGGACACTGCCGTGTACTACTGCGCCCGCGTCGGAAAAGCTGTGCCCGACGTC |
| | | TGGGGCCAGGGAACCACTGTGACCGTGTCCAGCGGCGGGGGTGGATCGGGCGG |
| | | TGGAGGGTCCGGTGGAGGGGGCTCAGATATTGTGATGACCCAGACCCCCTCGT |
| | | CCCTGTCCGCCTCGGTCGGCGACCGCGTGACTATCACATGTAGAGCCTCGCAG |
| | | AGCATCTCCAGCTACCTGAACTGGTATCAGCAGAAGCCGGGGAAGGCCCCGAA |
| | | GCTCCTGATCTACGCGGCATCATCACTGCAATCGGGAGTGCCGAGCCGGTTTT |
| | | CCGGGTCCGGCTCCGGCACCGACTTCACGCTGACCATTTCTTCCCTGCAACCC |
| | | GAGGACTTCGCCACTTACTACTGCCAGCAGTCCTACTCCACCCCTTACTCCTT |
| | | CGGCCAAGGAACCAGGCTGGAAATCAAG |
| BCMA_EBB- | 183 | EVQLVETGGGLVQPGRSLRLSCAASGFTFDDYAMHWVRQAPGKGLEWVSGISW |
| C1978-D10- | | NSGSIGYADSVKGRFTISRDNAKNSLYLQMNSLRDEDTAVYYCARVGKAVPDV |
| aa | | WGQGTTVTVSS |
| VH | | |
| BCMA_EBB- | 204 | DIVMTQTPSSLSASVGDRVTITCRASQSISSYLNWYQQKPGKAPKLLIYAASS |
| C1978-D10- | | LQSGVPSRFSGSGSGTDFTLTISSLQPEDFATYYCQQSYSTPYSFGQGTRLEI |
| aa | | K |
| VL | | |
| BCMA_EBB- | 225 | MALPVTALLLPLALLLHAARPEVQLVETGGGLVQPGRSLRLSCAASGFTFDDY |
| C1978-D10- | | AMHWVRQAPGKGLEWVSGISWNSGSIGYADSVKGRFTISRDNAKNSLYLQMNS |
| aa | | LRDEDTAVYYCARVGKAVPDVWGQGTTVTVSSGGGGSGGGGSGGGGSDIVMTQ |
| Full CART | | TPSSLSASVGDRVTITCRASQSISSYLNWYQQKPGKAPKLLIYAASSLQSGVP |
| | | SRFSGSGSGTDFTLTISSLQPEDFATYYCQQSYSTPYSFGQGTRLEIKTTTPA |
| | | PRPPTPAPTIASQPLSLRPEACRPAAGGAVHTRGLDFACDIYIWAPLAGTCGV |
| | | LLLSLVITLYCKRGRKKLLYIFKQPFMRPVQTTQEEDGCSCRFPEEEEGGCEL |
| | | RVKFSRSADAPAYKQGQNQLYNELNLGRREEYDVLDKRRGRDPEMGGKPRRKN |
| | | PQEGLYNELQKDKMAEAYSEIGMKGERRRGKGHDGLYQGLSTATKDTYDALHM |
| | | QALPPR |
| BCMA_EBB- | 246 | ATGGCCCTCCCTGTCACCGCCCTGCTGCTTCCGCTGGCTCTTCTGCTCCACGC |
| C1978-D10- | | CGCTCGGCCCGAAGTGCAGCTCGTGGAAACTGGAGGTGGACTCGTGCAGCCTG |
| nt | | GACGGTCGCTGCGGCTGAGCTGCGCTGCATCCGGCTTCACCTTCGACGATTAT |
| Full CART | | GCCATGCACTGGGTCAGACAGGCGCCAGGGAAGGGACTTGAGTGGGTGTCCGG |
| | | TATCAGCTGGAATAGCGGCTCAATCGGATACGCGGACTCCGTGAAGGGAAGGT |
| | | TCACCATTTCCCGCGACAACGCCAAGAACTCCCTGTACTTGCAAATGAACAGC |
| | | CTCCGGGATGAGGACACTGCCGTGTACTACTGCGCCCGCGTCGGAAAAGCTGT |
| | | GCCCGACGTCTGGGGCCAGGGAACCACTGTGACCGTGTCCAGCGGCGGGGGTG |
| | | GATCGGGCGGTGGAGGGTCCGGTGGAGGGGGCTCAGATATTGTGATGACCCAG |
| | | ACCCCCTCGTCCCTGTCCGCCTCGGTCGGCGACCGCGTGACTATCACATGTAG |
| | | AGCCTCGCAGAGCATCTCCAGCTACCTGAACTGGTATCAGCAGAAGCCGGGGA |
| | | AGGCCCCGAAGCTCCTGATCTACGCGGCATCATCACTGCAATCGGGAGTGCCG |
| | | AGCCGGTTTTCCGGGTCCGGCTCCGGCACCGACTTCACGCTGACCATTTCTTC |
| | | CCTGCAACCCGAGGACTTCGCCACTTACTACTGCCAGCAGTCCTACTCCACCC |
| | | CTTACTCCTTCGGCCAAGGAACCAGGCTGGAAATCAAGACCACTACCCCAGCA |
| | | CCGAGGCCACCCACCCCGGCTCCTACCATCGCCTCCCAGCCTCTGTCCCTGCG |
| | | TCCGGAGGCATGTAGACCCGCAGCTGGTGGGGCCGTGCATACCCGGGGTCTTG |
| | | ACTTCGCCTGCGATATCTACATTTGGGCCCCTCTGGCTGGTACTTGCGGGGTC |
| | | CTGCTGCTTTCACTCGTGATCACTCTTTACTGTAAGCGCGGTCGGAAGAAGCT |
| | | GCTGTACATCTTTAAGCAACCCTTCATGAGGCCTGTGCAGACTACTCAAGAGG |
| | | AGGACGGCTGTTCATGCCGGTTCCCAGAGGAGGAGGAAGGCGGCTGCGAACTG |
| | | CGCGTGAAATTCAGCCGCAGCGCAGATGCTCCAGCCTACAAGCAGGGGCAGAA |
| | | CCAGCTCTACAACGAACTCAATCTTGGTCGGAGAGAGGAGTACGACGTGCTGG |
| | | ACAAGCGGAGAGGACGGGACCCAGAAATGGGCGGGAAGCCGCGCAGAAAGAAT |
| | | CCCCAAGAGGGCCTGTACAACGAGCTCCAAAAGGATAAGATGGCAGAAGCCTA |
| | | TAGCGAGATTGGTATGAAAGGGGAACGCAGAAGAGGCAAAGGCCACGACGGAC |
| | | TGTACCAGGGACTCAGCACCGCCACCAAGGACACCTATGACGCTCTTCACATG |
| | | CAGGCCCTGCCGCCTCGG |

BCMA_EBB-C1979-C12

| | | |
|---|---|---|
| BCMA_EBB- | 142 | EVQLVESGGGLVQPGRSLRLSCTASGFTFDDYAMHWVRQRPGKGLEWVASINW |
| C1979-C12- | | KGNSLAYGDSVKGRFAISRDNAKNTVFLQMNSLRTEDTAVYYCASHQGVAYYN |
| aa | | YAMDVWGRGTLVTVSSGGGGSGGGGSGGGGSEIVLTQSPGTLSLSPGERATLS |
| ScFv domain | | CRATQSIGSSFLAWYQQRPGQAPRLLIYGASQRATGIPDRFSGRGSGTDFTLT |
| | | ISRVEPEDSAVYYCQHYESSPSWTFGQGTKVEIK |
| BCMA_EBB- | 163 | GAAGTGCAGCTCGTGGAGAGCGGGGGAGGATTGGTGCAGCCCGGAAGGTCCCT |
| C1979-C12- | | GCGGCTCTCCTGCACTGCGTCTGGCTTCACCTTCGACGACTACGCGATGCACT |
| nt | | GGGTCAGACAGCGCCCGGGAAAGGGCCTGGAATGGGTCGCCTCAATCAACTGG |
| ScFv domain | | AAGGGAAACTCCCTGGCCTATGGCGACAGCGTGAAGGGCCGCTTCGCCATTTC |
| | | GCGCGACAACGCCAAGAACACCGTGTTTCTGCAAATGAATTCCCTGCGGACCG |
| | | AGGATACCGCTGTGTACTACTGCGCCAGCCACCAGGGCGTGGCATACTATAAC |
| | | TACGCCATGGACGTGTGGGGAAGAGGGACGCTCGTCACCGTGTCCTCCGGGGG |
| | | CGGTGGATCGGGTGGAGGAGGAAGCGGTGGCGGGGGCAGCGAAATCGTGCTGA |
| | | CTCAGAGCCCGGGAACTCTTTCACTGTCCCCGGGAGAACGGGCCACTCTCTCG |
| | | TGCCGGGCCACCCAGTCCATCGGCTCCTCCTTCCTTGCCTGGTACCAGCAGAG |
| | | GCCAGGACAGGCGCCCCGCCTGCTGATCTACGGTGCTTCCCAACGCGCCACTG |
| | | GCATTCCTGACCGGTTCAGCGGCAGAGGGTCGGGAACCGATTTCACACTGACC |
| | | ATTTCCCGGGTGGAGCCCGAAGATTCGGCAGTCTACTACTGTCAGCATTACGA |
| | | GTCCTCCCCTTCATGGACCTTCGGTCAAGGGACCAAAGTGGAGATCAAG |
| BCMA_EBB- | 184 | EVQLVESGGGLVQPGRSLRLSCTASGFTFDDYAMHWVRQRPGKGLEWVASINW |
| C1979-C12- | | KGNSLAYGDSVKGRFAISRDNAKNTVFLQMNSLRTEDTAVYYCASHQGVAYYN |
| aa | | YAMDVWGRGTLVTVSS |
| VH | | |
| BCMA_EBB- | 205 | EIVLTQSPGTLSLSPGERATLSCRATQSIGSSFLAWYQQRPGQAPRLLIYGAS |
| C1979-C12- | | QRATGIPDRFSGRGSGTDFTLTISRVEPEDSAVYYCQHYESSPSWTFGQGTKV |
| aa | | EIK |
| VL | | |
| BCMA_EBB- | 226 | MALPVTALLLPLALLLHAARPEVQLVESGGGLVQPGRSLRLSCTASGFTFDDY |
| C1979-C12- | | AMHWVRQRPGKGLEWVASINWKGNSLAYGDSVKGRFAISRDNAKNTVFLQMNS |
| aa | | LRTEDTAVYYCASHQGVAYYNYAMDVWGRGTLVTVSSGGGGSGGGGSGGGGSE |
| Full CART | | IVLTQSPGTLSLSPGERATLSCRATQSIGSSFLAWYQQRPGQAPRLLIYGASQ |
| | | RATGIPDRFSGRGSGTDFTLTISRVEPEDSAVYYCQHYESSPSWTFGQGTKVE |
| | | IKTTTPAPRPPTPAPTIASQPLSLRPEACRPAAGGAVHTRGLDFACDIYIWAP |
| | | LAGTCGVLLLSLVITLYCKRGRKKLLYIFKQPFMRPVQTTQEEDGCSCRFPEE |
| | | EEGGCELRVKFSRSADAPAYKQGQNQLYNELNLGRREEYDVLDKRRGRDPEMG |
| | | GKPRRKNPQEGLYNELQKDKMAEAYSEIGMKGERRRGKGHDGLYQGLSTATKD |
| | | TYDALHMQALPPR |
| BCMA_EBB- | 247 | ATGGCCCTCCCTGTCACCGCCCTGCTGCTTCCGCTGGCTCTTCTGCTCCACGC |
| C1979-C12- | | CGCTCGGCCCGAAGTGCAGCTCGTGGAGAGCGGGGGAGGATTGGTGCAGCCCG |
| nt | | GAAGGTCCCTGCGGCTCTCCTGCACTGCGTCTGGCTTCACCTTCGACGACTAC |
| Full CART | | GCGATGCACTGGGTCAGACAGCGCCCGGGAAAGGGCCTGGAATGGGTCGCCTC |
| | | AATCAACTGGAAGGGAAACTCCCTGGCCTATGGCGACAGCGTGAAGGGCCGCT |
| | | TCGCCATTTCGCGCGACAACGCCAAGAACACCGTGTTTCTGCAAATGAATTCC |
| | | CTGCGGACCGAGGATACCGCTGTGTACTACTGCGCCAGCCACCAGGGCGTGGC |
| | | ATACTATAACTACGCCATGGACGTGTGGGGAAGAGGGACGCTCGTCACCGTGT |
| | | CCTCCGGGGGCGGTGGATCGGGTGGAGGAGGAAGCGGTGGCGGGGGCAGCGAA |
| | | ATCGTGCTGACTCAGAGCCCGGGAACTCTTTCACTGTCCCCGGGAGAACGGGC |
| | | CACTCTCTCGTGCCGGGCCACCCAGTCCATCGGCTCCTCCTTCCTTGCCTGGT |
| | | ACCAGCAGAGGCCAGGACAGGCGCCCCGCCTGCTGATCTACGGTGCTTCCCAA |
| | | CGCGCCACTGGCATTCCTGACCGGTTCAGCGGCAGAGGGTCGGGAACCGATTT |
| | | CACACTGACCATTTCCCGGGTGGAGCCCGAAGATTCGGCAGTCTACTACTGTC |
| | | AGCATTACGAGTCCTCCCCTTCATGGACCTTCGGTCAAGGGACCAAAGTGGAG |
| | | ATCAAGACCACTACCCCAGCACCGAGGCCACCCACCCCGGCTCCTACCATCGC |
| | | CTCCCAGCCTCTGTCCCTGCGTCCGGAGGCATGTAGACCCGCAGCTGGTGGGG |
| | | CCGTGCATACCCGGGGTCTTGACTTCGCCTGCGATATCTACATTTGGGCCCCT |
| | | CTGGCTGGTACTTGCGGGGTCCTGCTGCTTTCACTCGTGATCACTCTTTACTG |
| | | TAAGCGCGGTCGGAAGAAGCTGCTGTACATCTTTAAGCAACCCTTCATGAGGC |
| | | CTGTGCAGACTACTCAAGAGGAGGACGGCTGTTCATGCCGGTTCCCAGAGGAG |
| | | GAGGAAGGCGGCTGCGAACTGCGCGTGAAATTCAGCCGCAGCGCAGATGCTCC |
| | | AGCCTACAAGCAGGGGCAGAACCAGCTCTACAACGAACTCAATCTTGGTCGGA |
| | | GAGAGGAGTACGACGTGCTGGACAAGCGGAGAGGACGGGACCCAGAAATGGGC |
| | | GGGAAGCCGCGCAGAAAGAATCCCCAAGAGGGCCTGTACAACGAGCTCCAAAA |
| | | GGATAAGATGGCAGAAGCCTATAGCGAGATTGGTATGAAAGGGGAACGCAGAA |
| | | GAGGCAAAGGCCACGACGGACTGTACCAGGGACTCAGCACCGCCACCAAGGAC |
| | | ACCTATGACGCTCTTCACATGCAGGCCCTGCCGCCTCGG |

BCMA_EBB-C1980-G4

| | | |
|---|---|---|
| BCMA_EBB- | 143 | EVQLVESGGGLVQPGGSLRLSCAASGFTFSSYAMSWVRQAPGKGLEWVSAISG |
| C1980-G4-aa | | SGGSTYYADSVKGRFTISRDNSKNTLYLQMNSLRAEDTAVYYCAKVVRDGMDV |
| ScFv domain | | WGQGTTVTVSSGGGGSGGGGSGGGGSEIVLTQSPATLSLSPGERATLSCRASQ |
| | | SVSSSYLAWYQQKPGQAPRLLIYGASSRATGIPDRFSGNGSGTDFTLTISRLE |
| | | PEDFAVYYCQQYGSPPRFTFGPGTKVDIK |
| BCMA_EBB- | 164 | GAGGTGCAGTTGGTCGAAAGCGGGGGCGGGCTTGTGCAGCCTGGCGGATCACT |
| C1980-G4-nt | | GCGGCTGTCCTGCGCGGCATCAGGCTTCACGTTTTCTTCCTACGCCATGTCCT |
| ScFv domain | | GGGTGCGCCAGGCCCCTGGAAAGGGACTGGAATGGGTGTCCGCGATTTCGGGG |
| | | TCCGGCGGGAGCACCTACTACGCCGATTCCGTGAAGGGCCGCTTCACTATCTC |
| | | GCGGGACAACTCCAAGAACACCCTCTACCTCCAAATGAATAGCCTGCGGGCCG |
| | | AGGATACCGCCGTCTACTATTGCGCTAAGGTCGTGCGCGACGGAATGGACGTG |
| | | TGGGGACAGGGTACCACCGTGACAGTGTCCTCGGGGGGAGGCGGTAGCGGCGG |
| | | AGGAGGAAGCGGTGGTGGAGGTTCCGAGATTGTGCTGACTCAATCACCCGCGA |
| | | CCCTGAGCCTGTCCCCCGGCGAAAGGGCCACTCTGTCCTGTCGGGCCAGCCAA |
| | | TCAGTCTCCTCCTCGTACCTGGCCTGGTACCAGCAGAAGCCAGGACAGGCTCC |
| | | GAGACTCCTTATCTATGGCGCATCCTCCCGCGCCACCGGAATCCCGGATAGGT |
| | | TCTCGGGAAACGGATCGGGGACCGACTTCACTCTCACCATCTCCCGGCTGGAA |
| | | CCGGAGGACTTCGCCGTGTACTACTGCCAGCAGTACGGCAGCCCGCCTAGATT |
| | | CACTTTCGGCCCCGGCACCAAAGTGGACATCAAG |
| BCMA_EBB- | 185 | EVQLVESGGGLVQPGGSLRLSCAASGFTFSSYAMSWVRQAPGKGLEWVSAISG |
| C1980-G4-aa | | SGGSTYYADSVKGRFTISRDNSKNTLYLQMNSLRAEDTAVYYCAKVVRDGMDV |
| VH | | WGQGTTVTVSS |
| BCMA_EBB- | 206 | EIVLTQSPATLSLSPGERATLSCRASQSVSSSYLAWYQQKPGQAPRLLIYGAS |
| C1980-G4-aa | | SRATGIPDRFSGNGSGTDFTLTISRLEPEDFAVYYCQQYGSPPRFTFGPGTKV |
| VL | | DIK |
| BCMA_EBB- | 227 | MALPVTALLLPLALLLHAARPEVQLVESGGGLVQPGGSLRLSCAASGFTFSSY |
| C1980-G4-aa | | AMSWVRQAPGKGLEWVSAISGSGGSTYYADSVKGRFTISRDNSKNTLYLQMNS |
| Full CART | | LRAEDTAVYYCAKVVRDGMDVWGQGTTVTVSSGGGGSGGGGSGGGGSEIVLTQ |
| | | SPATLSLSPGERATLSCRASQSVSSSYLAWYQQKPGQAPRLLIYGASSRATGI |
| | | PDRFSGNGSGTDFTLTISRLEPEDFAVYYCQQYGSPPRFTFGPGTKVDIKTTT |
| | | PAPRPPTPAPTIASQPLSLRPEACRPAAGGAVHTRGLDFACDIYIWAPLAGTC |
| | | GVLLLSLVITLYCKRGRKKLLYIFKQPFMRPVQTTQEEDGCSCRFPEEEEGGC |
| | | ELRVKFSRSADAPAYKQGQNQLYNELNLGRREEYDVLDKRRGRDPEMGGKPRR |
| | | KNPQEGLYNELQKDKMAEAYSEIGMKGERRRGKGHDGLYQGLSTATKDTYDAL |
| | | HMQALPPR |
| BCMA_EBB- | 248 | ATGGCCCTCCCTGTCACCGCCCTGCTGCTTCCGCTGGCTCTTCTGCTCCACGC |
| C1980-G4-nt | | CGCTCGGCCCGAGGTGCAGTTGGTCGAAAGCGGGGGCGGGCTTGTGCAGCCTG |
| Full CART | | GCGGATCACTGCGGCTGTCCTGCGCGGCATCAGGCTTCACGTTTTCTTCCTAC |
| | | GCCATGTCCTGGGTGCGCCAGGCCCCTGGAAAGGGACTGGAATGGGTGTCCGC |
| | | GATTTCGGGGTCCGGCGGGAGCACCTACTACGCCGATTCCGTGAAGGGCCGCT |
| | | TCACTATCTCGCGGGACAACTCCAAGAACACCCTCTACCTCCAAATGAATAGC |
| | | CTGCGGGCCGAGGATACCGCCGTCTACTATTGCGCTAAGGTCGTGCGCGACGG |
| | | AATGGACGTGTGGGGACAGGGTACCACCGTGACAGTGTCCTCGGGGGGAGGCG |
| | | GTAGCGGCGGAGGAGGAAGCGGTGGTGGAGGTTCCGAGATTGTGCTGACTCAA |
| | | TCACCCGCGACCCTGAGCCTGTCCCCCGGCGAAAGGGCCACTCTGTCCTGTCG |
| | | GGCCAGCCAATCAGTCTCCTCCTCGTACCTGGCCTGGTACCAGCAGAAGCCAG |
| | | GACAGGCTCCGAGACTCCTTATCTATGGCGCATCCTCCCGCGCCACCGGAATC |
| | | CCGGATAGGTTCTCGGGAAACGGATCGGGGACCGACTTCACTCTCACCATCTC |
| | | CCGGCTGGAACCGGAGGACTTCGCCGTGTACTACTGCCAGCAGTACGGCAGCC |
| | | CGCCTAGATTCACTTTCGGCCCCGGCACCAAAGTGGACATCAAGACCACTACC |
| | | CCAGCACCGAGGCCACCCACCCCGGCTCCTACCATCGCCTCCCAGCCTCTGTC |
| | | CCTGCGTCCGGAGGCATGTAGACCCGCAGCTGGTGGGGCCGTGCATACCCGGG |
| | | GTCTTGACTTCGCCTGCGATATCTACATTTGGGCCCCTCTGGCTGGTACTTGC |
| | | GGGGTCCTGCTGCTTTCACTCGTGATCACTCTTTACTGTAAGCGCGGTCGGAA |
| | | GAAGCTGCTGTACATCTTTAAGCAACCCTTCATGAGGCCTGTGCAGACTACTC |
| | | AAGAGGAGGACGGCTGTTCATGCCGGTTCCCAGAGGAGGAGGAAGGCGGCTGC |
| | | GAACTGCGCGTGAAATTCAGCCGCAGCGCAGATGCTCCAGCCTACAAGCAGGG |
| | | GCAGAACCAGCTCTACAACGAACTCAATCTTGGTCGGAGAGAGGAGTACGACG |
| | | TGCTGGACAAGCGGAGAGGACGGGACCCAGAAATGGGCGGGAAGCCGCGCAGA |
| | | AAGAATCCCCAAGAGGGCCTGTACAACGAGCTCCAAAAGGATAAGATGGCAGA |
| | | AGCCTATAGCGAGATTGGTATGAAAGGGGAACGCAGAAGAGGCAAAGGCCACG |
| | | ACGGACTGTACCAGGGACTCAGCACCGCCACCAAGGACACCTATGACGCTCTT |
| | | CACATGCAGGCCCTGCCGCCTCGG |

BCMA_EBB-C1980-D2

| | | |
|---|---|---|
| BCMA_EBB- | 144 | EVQLLESGGGLVQPGGSLRLSCAASGFTFSSYAMSWVRQAPGKGLEWVSAISG |
| C1980-D2-aa | | SGGSTYYADSVKGRFTISRDNSKNTLYLQMNSLRAEDTAVYYCAKIPQTGTFD |
| ScFv domain | | YWGQGTLVTVSSGGGGSGGGGSGGGGSEIVLTQSPGTLSLSPGERATLSCRAS |
| | | QSVSSSYLAWYQQRPGQAPRLLIYGASSRATGIPDRFSGSGSGTDFTLTISRL |
| | | EPEDFAVYYCQHYGSSPSWTFGQGTRLEIK |
| BCMA_EBB- | 165 | GAAGTGCAGCTGCTGGAGTCCGGCGGTGGATTGGTGCAACCGGGGGGATCGCT |
| C1980-D2-nt | | CAGACTGTCCTGTGCGGCGTCAGGCTTCACCTTCTCGAGCTACGCCATGTCAT |
| ScFv domain | | GGGTCAGACAGGCCCCTGGAAAGGGTCTGGAATGGGTGTCCGCCATTTCCGGG |
| | | AGCGGGGGATCTACATACTACGCCGATAGCGTGAAGGGCCGCTTCACCATTTC |
| | | CCGGGACAACTCCAAGAACACTCTCTATCTGCAAATGAACTCCCTCCGCGCTG |
| | | AGGACACTGCCGTGTACTACTGCGCCAAAATCCCTCAGACCGGCACCTTCGAC |
| | | TACTGGGGACAGGGGACTCTGGTCACCGTCAGCAGCGGTGGCGGAGGTTCGGG |
| | | GGGAGGAGGAAGCGGCGGCGGAGGGTCCGAGATTGTGCTGACCCAGTCACCCG |
| | | GCACTTTGTCCCTGTCGCCTGGAGAAAGGGCCACCCTTTCCTGCCGGGCATCC |
| | | CAATCCGTGTCCTCCTCGTACCTGGCCTGGTACCAGCAGAGGCCCGGACAGGC |
| | | CCCACGGCTTCTGATCTACGGAGCAAGCAGCCGCGCGACCGGTATCCCGGACC |
| | | GGTTTTCGGGCTCGGGCTCAGGAACTGACTTCACCCTCACCATCTCCCGCCTG |
| | | GAACCCGAAGATTTCGCTGTGTATTACTGCCAGCACTACGGCAGCTCCCCGTC |
| | | CTGGACGTTCGGCCAGGGAACTCGGCTGGAGATCAAG |
| BCMA_EBB- | 186 | EVQLLESGGGLVQPGGSLRLSCAASGFTFSSYAMSWVRQAPGKGLEWVSAISG |
| C1980-D2-aa | | SGGSTYYADSVKGRFTISRDNSKNTLYLQMNSLRAEDTAVYYCAKIPQTGTFD |
| VH | | YWGQGTLVTVSS |
| BCMA_EBB- | 207 | EIVLTQSPGTLSLSPGERATLSCRASQSVSSSYLAWYQQRPGQAPRLLIYGAS |
| C1980-D2-aa | | SRATGIPDRFSGSGSGTDFTLTISRLEPEDFAVYYCQHYGSSPSWTFGQGTRL |
| VL | | EIK |
| BCMA_EBB- | 228 | MALPVTALLLPLALLLHAARPEVQLLESGGGLVQPGGSLRLSCAASGFTFSSY |
| C1980-D2-aa | | AMSWVRQAPGKGLEWVSAISGSGGSTYYADSVKGRFTISRDNSKNTLYLQMNS |
| Full CART | | LRAEDTAVYYCAKIPQTGTFDYWGQGTLVTVSSGGGGSGGGGSGGGGSEIVLT |
| | | QSPGTLSLSPGERATLSCRASQSVSSSYLAWYQQRPGQAPRLLIYGASSRATG |
| | | IPDRFSGSGSGTDFTLTISRLEPEDFAVYYCQHYGSSPSWTFGQGTRLEIKTT |
| | | TPAPRPPTPAPTIASQPLSLRPEACRPAAGGAVHTRGLDFACDIYIWAPLAGT |
| | | CGVLLLSLVITLYCKRGRKKLLYIFKQPFMRPVQTTQEEDGCSCRFPEEEEGG |
| | | CELRVKFSRSADAPAYKQGQNQLYNELNLGRREEYDVLDKRRGRDPEMGGKPR |
| | | RKNPQEGLYNELQKDKMAEAYSEIGMKGERRRGKGHDGLYQGLSTATKDTYDA |
| | | LHMQALPPR |
| BCMA_EBB- | 249 | ATGGCCCTCCCTGTCACCGCCCTGCTGCTTCCGCTGGCTCTTCTGCTCCACGC |
| C1980-D2-nt | | CGCTCGGCCCGAAGTGCAGCTGCTGGAGTCCGGCGGTGGATTGGTGCAACCGG |
| Full CART | | GGGGATCGCTCAGACTGTCCTGTGCGGCGTCAGGCTTCACCTTCTCGAGCTAC |
| | | GCCATGTCATGGGTCAGACAGGCCCCTGGAAAGGGTCTGGAATGGGTGTCCGC |
| | | CATTTCCGGGAGCGGGGGATCTACATACTACGCCGATAGCGTGAAGGGCCGCT |
| | | TCACCATTTCCCGGGACAACTCCAAGAACACTCTCTATCTGCAAATGAACTCC |
| | | CTCCGCGCTGAGGACACTGCCGTGTACTACTGCGCCAAAATCCCTCAGACCGG |
| | | CACCTTCGACTACTGGGGACAGGGGACTCTGGTCACCGTCAGCAGCGGTGGCG |
| | | GAGGTTCGGGGGGAGGAGGAAGCGGCGGCGGAGGGTCCGAGATTGTGCTGACC |
| | | CAGTCACCCGGCACTTTGTCCCTGTCGCCTGGAGAAAGGGCCACCCTTTCCTG |
| | | CCGGGCATCCCAATCCGTGTCCTCCTCGTACCTGGCCTGGTACCAGCAGAGGC |
| | | CCGGACAGGCCCCACGGCTTCTGATCTACGGAGCAAGCAGCCGCGCGACCGGT |
| | | ATCCCGGACCGGTTTTCGGGCTCGGGCTCAGGAACTGACTTCACCCTCACCAT |
| | | CTCCCGCCTGGAACCCGAAGATTTCGCTGTGTATTACTGCCAGCACTACGGCA |
| | | GCTCCCCGTCCTGGACGTTCGGCCAGGGAACTCGGCTGGAGATCAAGACCACT |
| | | ACCCCAGCACCGAGGCCACCCACCCCGGCTCCTACCATCGCCTCCCAGCCTCT |
| | | GTCCCTGCGTCCGGAGGCATGTAGACCCGCAGCTGGTGGGGCCGTGCATACCC |
| | | GGGGTCTTGACTTCGCCTGCGATATCTACATTTGGGCCCCTCTGGCTGGTACT |
| | | TGCGGGGTCCTGCTGCTTTCACTCGTGATCACTCTTTACTGTAAGCGCGGTCG |
| | | GAAGAAGCTGCTGTACATCTTTAAGCAACCCTTCATGAGGCCTGTGCAGACTA |
| | | CTCAAGAGGAGGACGGCTGTTCATGCCGGTTCCCAGAGGAGGAGGAAGGCGGC |
| | | TGCGAACTGCGCGTGAAATTCAGCCGCAGCGCAGATGCTCCAGCCTACAAGCA |
| | | GGGGCAGAACCAGCTCTACAACGAACTCAATCTTGGTCGGAGAGAGGAGTACG |
| | | ACGTGCTGGACAAGCGGAGAGGACGGGACCCAGAAATGGGCGGGAAGCCGCGC |
| | | AGAAAGAATCCCCAAGAGGGCCTGTACAACGAGCTCCAAAAGGATAAGATGGC |
| | | AGAAGCCTATAGCGAGATTGGTATGAAAGGGGAACGCAGAAGAGGCAAAGGCC |
| | | ACGACGGACTGTACCAGGGACTCAGCACCGCCACCAAGGACACCTATGACGCT |
| | | CTTCACATGCAGGCCCTGCCGCCTCGG |

BCMA_EBB-C1978-A10

| | | |
|---|---|---|
| BCMA_EBB- | 145 | EVQLVETGGGLVQPGGSLRLSCAASGFTFSSYAMSWVRQAPGKGLEWVSAISG |
| C1978-A10- | | SGGSTYYADSVKGRFTMSRENDKNSVFLQMNSLRVEDTGVYYCARANYKRELR |
| aa | | YYYGMDVWGQGTMVTVSSGGGGSGGGGSGGGGSEIVMTQSPGTLSLSPGESAT |
| ScFv domain | | LSCRASQRVASNYLAWYQHKPGQAPSLLISGASSRATGVPDRFSGSGSGTDFT |
| | | LAISRLEPEDSAVYYCQHYDSSPSWTFGQGTKVEIK |
| BCMA_EBB- | 166 | GAAGTGCAACTGGTGGAAACCGGTGGAGGACTCGTGCAGCCTGGCGGCAGCCT |
| C1978-A10- | | CCGGCTGAGCTGCGCCGCTTCGGGATTCACCTTTTCCTCCTACGCGATGTCTT |
| nt | | GGGTCAGACAGGCCCCCGGAAAGGGGCTGGAATGGGTGTCAGCCATCTCCGGC |
| ScFv domain | | TCCGGCGGATCAACGTACTACGCCGACTCCGTGAAAGGCCGGTTCACCATGTC |
| | | GCGCGAGAATGACAAGAACTCCGTGTTCCTGCAAATGAACTCCCTGAGGGTGG |
| | | AGGACACCGGAGTGTACTATTGTGCGCGCGCCAACTACAAGAGAGAGCTGCGG |
| | | TACTACTACGGAATGGACGTCTGGGGACAGGGAACTATGGTGACCGTGTCATC |
| | | CGGTGGAGGGGGAAGCGGCGGTGGAGGCAGCGGGGGCGGGGGTTCAGAAATTG |
| | | TCATGACCCAGTCCCCGGGAACTCTTTCCCTCTCCCCCGGGGAATCCGCGACT |
| | | TTGTCCTGCCGGGCCAGCCAGCGCGTGGCCTCGAACTACCTCGCATGGTACCA |
| | | GCATAAGCCAGGCCAAGCCCCTTCCCTGCTGATTTCCGGGGCTAGCAGCCGCG |
| | | CCACTGGCGTGCCGGATAGGTTCTCGGGAAGCGGCTCGGGTACCGATTTCACC |
| | | CTGGCAATCTCGCGGCTGGAACCGGAGGATTCGGCCGTGTACTACTGCCAGCA |
| | | CTATGACTCATCCCCCTCCTGGACATTCGGACAGGGCACCAAGGTCGAGATCA |
| | | AG |
| BCMA_EBB- | 187 | EVQLVETGGGLVQPGGSLRLSCAASGFTFSSYAMSWVRQAPGKGLEWVSAISG |
| C1978-A10- | | SGGSTYYADSVKGRFTMSRENDKNSVFLQMNSLRVEDTGVYYCARANYKRELR |
| aa | | YYYGMDVWGQGTMVTVSS |
| VH | | |
| BCMA_EBB- | 208 | EIVMTQSPGTLSLSPGESATLSCRASQRVASNYLAWYQHKPGQAPSLLISGAS |
| C1978-A10- | | SRATGVPDRFSGSGSGTDFTLAISRLEPEDSAVYYCQHYDSSPSWTFGQGTKV |
| aa | | EIK |
| VL | | |
| BCMA_EBB- | 229 | MALPVTALLLPLALLLHAARPEVQLVETGGGLVQPGGSLRLSCAASGFTFSSY |
| C1978-A10- | | AMSWVRQAPGKGLEWVSAISGSGGSTYYADSVKGRFTMSRENDKNSVFLQMNS |
| aa | | LRVEDTGVYYCARANYKRELRYYYGMDVWGQGTMVTVSSGGGGSGGGGSGGGG |
| Full CART | | SEIVMTQSPGTLSLSPGESATLSCRASQRVASNYLAWYQHKPGQAPSLLISGA |
| | | SSRATGVPDRFSGSGSGTDFTLAISRLEPEDSAVYYCQHYDSSPSWTFGQGTK |
| | | VEIKTTTPAPRPPTPAPTIASQPLSLRPEACRPAAGGAVHTRGLDFACDIYIW |
| | | APLAGTCGVLLLSLVITLYCKRGRKKLLYIFKQPFMRPVQTTQEEDGCSCRFP |
| | | EEEEGGCELRVKFSRSADAPAYKQGQNQLYNELNLGRREEYDVLDKRRGRDPE |
| | | MGGKPRRKNPQEGLYNELQKDKMAEAYSEIGMKGERRRGKGHDGLYQGLSTAT |
| | | KDTYDALHMQALPPR |
| BCMA_EBB- | 250 | ATGGCCCTCCCTGTCACCGCCCTGCTGCTTCCGCTGGCTCTTCTGCTCCACGC |
| C1978-A10- | | CGCTCGGCCCGAAGTGCAACTGGTGGAAACCGGTGGAGGACTCGTGCAGCCTG |
| nt | | GCGGCAGCCTCCGGCTGAGCTGCGCCGCTTCGGGATTCACCTTTTCCTCCTAC |
| Full CART | | GCGATGTCTTGGGTCAGACAGGCCCCCGGAAAGGGGCTGGAATGGGTGTCAGC |
| | | CATCTCCGGCTCCGGCGGATCAACGTACTACGCCGACTCCGTGAAAGGCCGGT |
| | | TCACCATGTCGCGCGAGAATGACAAGAACTCCGTGTTCCTGCAAATGAACTCC |
| | | CTGAGGGTGGAGGACACCGGAGTGTACTATTGTGCGCGCGCCAACTACAAGAG |
| | | AGAGCTGCGGTACTACTACGGAATGGACGTCTGGGGACAGGGAACTATGGTGA |
| | | CCGTGTCATCCGGTGGAGGGGGAAGCGGCGGTGGAGGCAGCGGGGGCGGGGGT |
| | | TCAGAAATTGTCATGACCCAGTCCCCGGGAACTCTTTCCCTCTCCCCCGGGGA |
| | | ATCCGCGACTTTGTCCTGCCGGGCCAGCCAGCGCGTGGCCTCGAACTACCTCG |
| | | CATGGTACCAGCATAAGCCAGGCCAAGCCCCTTCCCTGCTGATTTCCGGGGCT |
| | | AGCAGCCGCGCCACTGGCGTGCCGGATAGGTTCTCGGGAAGCGGCTCGGGTAC |
| | | CGATTTCACCCTGGCAATCTCGCGGCTGGAACCGGAGGATTCGGCCGTGTACT |
| | | ACTGCCAGCACTATGACTCATCCCCCTCCTGGACATTCGGACAGGGCACCAAG |
| | | GTCGAGATCAAGACCACTACCCCAGCACCGAGGCCACCCACCCCGGCTCCTAC |
| | | CATCGCCTCCCAGCCTCTGTCCCTGCGTCCGGAGGCATGTAGACCCGCAGCTG |
| | | GTGGGGCCGTGCATACCCGGGGTCTTGACTTCGCCTGCGATATCTACATTTGG |
| | | GCCCCTCTGGCTGGTACTTGCGGGGTCCTGCTGCTTTCACTCGTGATCACTCT |
| | | TTACTGTAAGCGCGGTCGGAAGAAGCTGCTGTACATCTTTAAGCAACCCTTCA |
| | | TGAGGCCTGTGCAGACTACTCAAGAGGAGGACGGCTGTTCATGCCGGTTCCCA |
| | | GAGGAGGAGGAAGGCGGCTGCGAACTGCGCGTGAAATTCAGCCGCAGCGCAGA |
| | | TGCTCCAGCCTACAAGCAGGGGCAGAACCAGCTCTACAACGAACTCAATCTTG |
| | | GTCGGAGAGAGGAGTACGACGTGCTGGACAAGCGGAGAGGACGGGACCCAGAA |
| | | ATGGGCGGGAAGCCGCGCAGAAAGAATCCCCAAGAGGGCCTGTACAACGAGCT |
| | | CCAAAAGGATAAGATGGCAGAAGCCTATAGCGAGATTGGTATGAAAGGGGAAC |
| | | GCAGAAGAGGCAAAGGCCACGACGGACTGTACCAGGGACTCAGCACCGCCACC |
| | | AAGGACACCTATGACGCTCTTCACATGCAGGCCCTGCCGCCTCGG |

BCMA_EBB-C1978-D4

| | | |
|---|---|---|
| BCMA_EBB- | 146 | EVQLLETGGGLVQPGGSLRLSCAASGFSFSSYAMSWVRQAPGKGLEWVSAISG |
| C1978-D4-aa | | SGGSTYYADSVKGRFTISRDNSKNTLYLQMNSLRAEDTAVYYCAKALVGATGA |
| ScFv domain | | FDIWGQGTLVTVSSGGGGSGGGGSGGGGSEIVLTQSPGTLSLSPGERATLSCR |
| | | ASQSLSSNFLAWYQQKPGQAPGLLIYGASNWATGTPDRFSGSGSGTDFTLTIT |
| | | RLEPEDFAVYYCQYYGTSPMYTFGQGTKVEIK |
| BCMA_EBB- | 167 | GAAGTGCAGCTGCTCGAAACCGGTGGAGGGCTGGTGCAGCCAGGGGGCTCCCT |
| C1978-D4-nt | | GAGGCTTTCATGCGCCGCTAGCGGATTCTCCTTCTCCTCTTACGCCATGTCGT |
| ScFv domain | | GGGTCCGCCAAGCCCCTGGAAAAGGCCTGGAATGGGTGTCCGCGATTTCCGGG |
| | | AGCGGAGGTTCGACCTATTACGCCGACTCCGTGAAGGGCCGCTTTACCATCTC |
| | | CCGGGATAACTCCAAGAACACTCTGTACCTCCAAATGAACTCGCTGAGAGCCG |
| | | AGGACACCGCCGTGTATTACTGCGCGAAGGCGCTGGTCGGCGCGACTGGGGCA |
| | | TTCGACATCTGGGGACAGGGAACTCTTGTGACCGTGTCGAGCGGAGGCGGCGG |
| | | CTCCGGCGGAGGAGGGAGCGGGGGCGGTGGTTCCGAAATCGTGTTGACTCAGT |
| | | CCCCGGGAACCCTGAGCTTGTCACCCGGGGAGCGGGCCACTCTCTCCTGTCGC |
| | | GCCTCCCAATCGCTCTCATCCAATTTCCTGGCCTGGTACCAGCAGAAGCCCGG |
| | | ACAGGCCCCGGGCCTGCTCATCTACGGCGCTTCAAACTGGGCAACGGGAACCC |
| | | CTGATCGGTTCAGCGGAAGCGGATCGGGTACTGACTTTACCCTGACCATCACC |
| | | AGACTGGAACCGGAGGACTTCGCCGTGTACTACTGCCAGTACTACGGCACCTC |
| | | CCCCATGTACACATTCGGACAGGGTACCAAGGTCGAGATTAAG |
| BCMA_EBB- | 188 | EVQLLETGGGLVQPGGSLRLSCAASGFSFSSYAMSWVRQAPGKGLEWVSAISG |
| C1978-D4-aa | | SGGSTYYADSVKGRFTISRDNSKNTLYLQMNSLRAEDTAVYYCAKALVGATGA |
| VH | | FDIWGQGTLVTVSS |
| BCMA_EBB- | 209 | EIVLTQSPGTLSLSPGERATLSCRASQSLSSNFLAWYQQKPGQAPGLLIYGAS |
| C1978-D4-aa | | NWATGTPDRFSGSGSGTDFTLTITRLEPEDFAVYYCQYYGTSPMYTFGQGTKV |
| VL | | EIK |
| BCMA_EBB- | 230 | MALPVTALLLPLALLLHAARPEVQLLETGGGLVQPGGSLRLSCAASGFSFSSY |
| C1978-D4-aa | | AMSWVRQAPGKGLEWVSAISGSGGSTYYADSVKGRFTISRDNSKNTLYLQMNS |
| Full CART | | LRAEDTAVYYCAKALVGATGAFDIWGQGTLVTVSSGGGGSGGGGSGGGGSEIV |
| | | LTQSPGTLSLSPGERATLSCRASQSLSSNFLAWYQQKPGQAPGLLIYGASNWA |
| | | TGTPDRFSGSGSGTDFTLTITRLEPEDFAVYYCQYYGTSPMYTFGQGTKVEIK |
| | | TTTPAPRPPTPAPTIASQPLSLRPEACRPAAGGAVHTRGLDFACDIYIWAPLA |
| | | GTCGVLLLSLVITLYCKRGRKKLLYIFKQPFMRPVQTTQEEDGCSCRFPEEEE |
| | | GGCELRVKFSRSADAPAYKQGQNQLYNELNLGRREEYDVLDKRRGRDPEMGGK |
| | | PRRKNPQEGLYNELQKDKMAEAYSEIGMKGERRRGKGHDGLYQGLSTATKDTY |
| | | DALHMQALPPR |
| BCMA_EBB- | 251 | ATGGCCCTCCCTGTCACCGCCCTGCTGCTTCCGCTGGCTCTTCTGCTCCACGC |
| C1978-D4-nt | | CGCTCGGCCCGAAGTGCAGCTGCTCGAAACCGGTGGAGGGCTGGTGCAGCCAG |
| Full CART | | GGGGCTCCCTGAGGCTTTCATGCGCCGCTAGCGGATTCTCCTTCTCCTCTTAC |
| | | GCCATGTCGTGGGTCCGCCAAGCCCCTGGAAAAGGCCTGGAATGGGTGTCCGC |
| | | GATTTCCGGGAGCGGAGGTTCGACCTATTACGCCGACTCCGTGAAGGGCCGCT |
| | | TTACCATCTCCCGGGATAACTCCAAGAACACTCTGTACCTCCAAATGAACTCG |
| | | CTGAGAGCCGAGGACACCGCCGTGTATTACTGCGCGAAGGCGCTGGTCGGCGC |
| | | GACTGGGGCATTCGACATCTGGGGACAGGGAACTCTTGTGACCGTGTCGAGCG |
| | | GAGGCGGCGGCTCCGGCGGAGGAGGGAGCGGGGGCGGTGGTTCCGAAATCGTG |
| | | TTGACTCAGTCCCCGGGAACCCTGAGCTTGTCACCCGGGGAGCGGGCCACTCT |
| | | CTCCTGTCGCGCCTCCCAATCGCTCTCATCCAATTTCCTGGCCTGGTACCAGC |
| | | AGAAGCCCGGACAGGCCCCGGGCCTGCTCATCTACGGCGCTTCAAACTGGGCA |
| | | ACGGGAACCCCTGATCGGTTCAGCGGAAGCGGATCGGGTACTGACTTTACCCT |
| | | GACCATCACCAGACTGGAACCGGAGGACTTCGCCGTGTACTACTGCCAGTACT |
| | | ACGGCACCTCCCCCATGTACACATTCGGACAGGGTACCAAGGTCGAGATTAAG |
| | | ACCACTACCCCAGCACCGAGGCCACCCACCCCGGCTCCTACCATCGCCTCCCA |
| | | GCCTCTGTCCCTGCGTCCGGAGGCATGTAGACCCGCAGCTGGTGGGGCCGTGC |
| | | ATACCCGGGGTCTTGACTTCGCCTGCGATATCTACATTTGGGCCCCTCTGGCT |
| | | GGTACTTGCGGGGTCCTGCTGCTTTCACTCGTGATCACTCTTTACTGTAAGCG |
| | | CGGTCGGAAGAAGCTGCTGTACATCTTTAAGCAACCCTTCATGAGGCCTGTGC |
| | | AGACTACTCAAGAGGAGGACGGCTGTTCATGCCGGTTCCCAGAGGAGGAGGAA |
| | | GGCGGCTGCGAACTGCGCGTGAAATTCAGCCGCAGCGCAGATGCTCCAGCCTA |
| | | CAAGCAGGGGCAGAACCAGCTCTACAACGAACTCAATCTTGGTCGGAGAGAGG |
| | | AGTACGACGTGCTGGACAAGCGGAGAGGACGGGACCCAGAAATGGGCGGGAAG |
| | | CCGCGCAGAAAGAATCCCCAAGAGGGCCTGTACAACGAGCTCCAAAAGGATAA |
| | | GATGGCAGAAGCCTATAGCGAGATTGGTATGAAAGGGGAACGCAGAAGAGGCA |
| | | AAGGCCACGACGGACTGTACCAGGGACTCAGCACCGCCACCAAGGACACCTAT |
| | | GACGCTCTTCACATGCAGGCCCTGCCGCCTCGG |

BCMA_EBB-C1980-A2

| | | |
|---|---|---|
| BCMA_EBB- | 147 | EVQLLESGGGLVQPGGSLRLSCAASGFTFSSYAMSWVRQAPGKGLEWVSAISG |
| C1980-A2-aa | | SGGSTYYADSVKGRFTISRDNSKNTLYLQMNSLRAEDTAVYYCVLWFGEGFDP |
| ScFv domain | | WGQGTLVTVSSGGGGSGGGGSGGGGSDIVLTQSPLSLPVTPGEPASISCRSSQ |
| | | SLLHSNGYNYLDWYLQKPGQSPQLLIYLGSNRASGVPDRFSGSGSGTDFTLKI |
| | | SRVEAEDVGVYYCMQALQTPLTFGGGTKVDIK |
| BCMA_EBB- | 168 | GAAGTGCAGCTGCTTGAGAGCGGTGGAGGTCTGGTGCAGCCCGGGGGATCACT |
| C1980-A2-nt | | GCGCCTGTCCTGTGCCGCGTCCGGTTTCACTTTCTCCTCGTACGCCATGTCGT |
| ScFv domain | | GGGTCAGACAGGCACCGGGAAAGGGACTGGAATGGGTGTCAGCCATTTCGGGT |
| | | TCGGGGGGCAGCACCTACTACGCTGACTCCGTGAAGGGCCGGTTCACCATTTC |
| | | CCGCGACAACTCCAAGAACACCTTGTACCTCCAAATGAACTCCCTGCGGGCCG |
| | | AAGATACCGCCGTGTATTACTGCGTGCTGTGGTTCGGAGAGGGATTCGACCCG |
| | | TGGGGACAAGGAACACTCGTGACTGTGTCATCCGGCGGAGGCGGCAGCGGTGG |
| | | CGGCGGTTCCGGCGGCGGCGGATCTGACATCGTGTTGACCCAGTCCCCTCTGA |
| | | GCCTGCCGGTCACTCCTGGCGAACCAGCCAGCATCTCCTGCCGGTCGAGCCAG |
| | | TCCCTCCTGCACTCCAATGGGTACAACTACCTCGATTGGTATCTGCAAAAGCC |
| | | GGGCCAGAGCCCCCAGCTGCTGATCTACCTTGGGTCAAACCGCGCTTCCGGGG |
| | | TGCCTGATAGATTCTCCGGGTCCGGGAGCGGAACCGACTTTACCCTGAAAATC |
| | | TCGAGGGTGGAGGCCGAGGACGTCGGAGTGTACTACTGCATGCAGGCGCTCCA |
| | | GACTCCCCTGACCTTCGGAGGAGGAACGAAGGTCGACATCAAGA |
| BCMA_EBB- | 189 | EVQLLESGGGLVQPGGSLRLSCAASGFTFSSYAMSWVRQAPGKGLEWVSAISG |
| C1980-A2-aa | | SGGSTYYADSVKGRFTISRDNSKNTLYLQMNSLRAEDTAVYYCVLWFGEGFDP |
| VH | | WGQGTLVTVSS |
| BCMA_EBB- | 210 | DIVLTQSPLSLPVTPGEPASISCRSSQSLLHSNGYNYLDWYLQKPGQSPQLLI |
| C1980-A2-aa | | YLGSNRASGVPDRFSGSGSGTDFTLKISRVEAEDVGVYYCMQALQTPLTFGGG |
| VL | | TKVDIK |
| BCMA_EBB- | 231 | MALPVTALLLPLALLLHAARPEVQLLESGGGLVQPGGSLRLSCAASGFTFSSY |
| C1980-A2-aa | | AMSWVRQAPGKGLEWVSAISGSGGSTYYADSVKGRFTISRDNSKNTLYLQMNS |
| Full CART | | LRAEDTAVYYCVLWFGEGFDPWGQGTLVTVSSGGGGSGGGGSGGGGSDIVLTQ |
| | | SPLSLPVTPGEPASISCRSSQSLLHSNGYNYLDWYLQKPGQSPQLLIYLGSNR |
| | | ASGVPDRFSGSGSGTDFTLKISRVEAEDVGVYYCMQALQTPLTFGGGTKVDIK |
| | | TTTPAPRPPTPAPTIASQPLSLRPEACRPAAGGAVHTRGLDFACDIYIWAPLA |
| | | GTCGVLLLSLVITLYCKRGRKKLLYIFKQPFMRPVQTTQEEDGCSCRFPEEEE |
| | | GGCELRVKFSRSADAPAYKQGQNQLYNELNLGRREEYDVLDKRRGRDPEMGGK |
| | | PRRKNPQEGLYNELQKDKMAEAYSEIGMKGERRRGKGHDGLYQGLSTATKDTY |
| | | DALHMQALPPR |
| BCMA_EBB- | 252 | ATGGCCCTCCCTGTCACCGCCCTGCTGCTTCCGCTGGCTCTTCTGCTCCACGC |
| C1980-A2-nt | | CGCTCGGCCCGAAGTGCAGCTGCTTGAGAGCGGTGGAGGTCTGGTGCAGCCCG |
| Full CART | | GGGGATCACTGCGCCTGTCCTGTGCCGCGTCCGGTTTCACTTTCTCCTCGTAC |
| | | GCCATGTCGTGGGTCAGACAGGCACCGGGAAAGGGACTGGAATGGGTGTCAGC |
| | | CATTTCGGGTTCGGGGGGCAGCACCTACTACGCTGACTCCGTGAAGGGCCGGT |
| | | TCACCATTTCCCGCGACAACTCCAAGAACACCTTGTACCTCCAAATGAACTCC |
| | | CTGCGGGCCGAAGATACCGCCGTGTATTACTGCGTGCTGTGGTTCGGAGAGGG |
| | | ATTCGACCCGTGGGGACAAGGAACACTCGTGACTGTGTCATCCGGCGGAGGCG |
| | | GCAGCGGTGGCGGCGGTTCCGGCGGCGGCGGATCTGACATCGTGTTGACCCAG |
| | | TCCCCTCTGAGCCTGCCGGTCACTCCTGGCGAACCAGCCAGCATCTCCTGCCG |
| | | GTCGAGCCAGTCCCTCCTGCACTCCAATGGGTACAACTACCTCGATTGGTATC |
| | | TGCAAAAGCCGGGCCAGAGCCCCCAGCTGCTGATCTACCTTGGGTCAAACCGC |
| | | GCTTCCGGGGTGCCTGATAGATTCTCCGGGTCCGGGAGCGGAACCGACTTTAC |
| | | CCTGAAAATCTCGAGGGTGGAGGCCGAGGACGTCGGAGTGTACTACTGCATGC |
| | | AGGCGCTCCAGACTCCCCTGACCTTCGGAGGAGGAACGAAGGTCGACATCAAG |
| | | ACCACTACCCCAGCACCGAGGCCACCCACCCCGGCTCCTACCATCGCCTCCCA |
| | | GCCTCTGTCCCTGCGTCCGGAGGCATGTAGACCCGCAGCTGGTGGGGCCGTGC |
| | | ATACCCGGGGTCTTGACTTCGCCTGCGATATCTACATTTGGGCCCCTCTGGCT |
| | | GGTACTTGCGGGGTCCTGCTGCTTTCACTCGTGATCACTCTTTACTGTAAGCG |
| | | CGGTCGGAAGAAGCTGCTGTACATCTTTAAGCAACCCTTCATGAGGCCTGTGC |
| | | AGACTACTCAAGAGGAGGACGGCTGTTCATGCCGGTTCCCAGAGGAGGAGGAA |
| | | GGCGGCTGCGAACTGCGCGTGAAATTCAGCCGCAGCGCAGATGCTCCAGCCTA |
| | | CAAGCAGGGGCAGAACCAGCTCTACAACGAACTCAATCTTGGTCGGAGAGAGG |
| | | AGTACGACGTGCTGGACAAGCGGAGAGGACGGGACCCAGAAATGGGCGGGAAG |
| | | CCGCGCAGAAAGAATCCCCAAGAGGGCCTGTACAACGAGCTCCAAAAGGATAA |
| | | GATGGCAGAAGCCTATAGCGAGATTGGTATGAAAGGGGAACGCAGAAGAGGCA |
| | | AAGGCCACGACGGACTGTACCAGGGACTCAGCACCGCCACCAAGGACACCTAT |
| | | GACGCTCTTCACATGCAGGCCCTGCCGCCTCGG |

BCMA_EBB-C1981-C3

| | | |
|---|---|---|
| BCMA_EBB- | 148 | QVQLVESGGGLVQPGGSLRLSCAASGFTFSSYAMSWVRQAPGKGLEWVSAISG |
| C1981-C3-aa | | SGGSTYYADSVKGRFTISRDNSKNTLYLQMNSLRAEDTAVYYCAKVGYDSSGY |
| ScFv domain | | YRDYYGMDVWGQGTTVTVSSGGGGSGGGGSGGGGSEIVLTQSPGTLSLSPGER |
| | | ATLSCRASQSVSSSYLAWYQQKPGQAPRLLIYGTSSRATGISDRFSGSGSGTD |
| | | FTLTISRLEPEDFAVYYCQHYGNSPPKFTFGPGTKLEIK |
| BCMA_EBB- | 169 | CAAGTGCAGCTCGTGGAGTCAGGCGGAGGACTGGTGCAGCCCGGGGGCTCCCT |
| C1981-C3-nt | | GAGACTTTCCTGCGCGGCATCGGGTTTTACCTTCTCCTCCTATGCTATGTCCT |
| ScFv domain | | GGGTGCGCCAGGCCCCGGGAAAGGGACTGGAATGGGTGTCCGCAATCAGCGGT |
| | | AGCGGGGGCTCAACATACTACGCCGACTCCGTCAAGGGTCGCTTCACTATTTC |
| | | CCGGGACAACTCCAAGAATACCCTGTACCTCCAAATGAACAGCCTCAGGGCCG |
| | | AGGATACTGCCGTGTACTACTGCGCCAAAGTCGGATACGATAGCTCCGGTTAC |
| | | TACCGGGACTACTACGGAATGGACGTGTGGGGACAGGGCACCACCGTGACCGT |
| | | GTCAAGCGGCGGAGGCGGTTCAGGAGGGGGAGGCTCCGGCGGTGGAGGGTCCG |
| | | AAATCGTCCTGACTCAGTCGCCTGGCACTCTGTCGTTGTCCCCGGGGGAGCGC |
| | | GCTACCCTGTCGTGTCGGGCGTCGCAGTCCGTGTCGAGCTCCTACCTCGCGTG |
| | | GTACCAGCAGAAGCCCGGACAGGCCCCTAGACTTCTGATCTACGGCACTTCTT |
| | | CACGCGCCACCGGGATCAGCGACAGGTTCAGCGGCTCCGGCTCCGGGACCGAC |
| | | TTCACCCTGACCATTAGCCGGCTGGAGCCTGAAGATTTCGCCGTGTATTACTG |
| | | CCAACACTACGGAAACTCGCCGCCAAAGTTCACGTTCGGACCCGGAACCAAGC |
| | | TGGAAATCAAG |
| BCMA_EBB- | 190 | QVQLVESGGGLVQPGGSLRLSCAASGFTFSSYAMSWVRQAPGKGLEWVSAISG |
| C1981-C3-aa | | SGGSTYYADSVKGRFTISRDNSKNTLYLQMNSLRAEDTAVYYCAKVGYDSSGY |
| VH | | YRDYYGMDVWGQGTTVTVSS |
| BCMA_EBB- | 211 | EIVLTQSPGTLSLSPGERATLSCRASQSVSSSYLAWYQQKPGQAPRLLIYGTS |
| C1981-C3-aa | | SRATGISDRFSGSGSGTDFTLTISRLEPEDFAVYYCQHYGNSPPKFTFGPGTK |
| VL | | LEIK |
| BCMA_EBB- | 232 | MALPVTALLLPLALLLHAARPQVQLVESGGGLVQPGGSLRLSCAASGFTFSSY |
| C1981-C3-aa | | AMSWVRQAPGKGLEWVSAISGSGGSTYYADSVKGRFTISRDNSKNTLYLQMNS |
| Full CART | | LRAEDTAVYYCAKVGYDSSGYYRDYYGMDVWGQGTTVTVSSGGGGSGGGGSGG |
| | | GGSEIVLTQSPGTLSLSPGERATLSCRASQSVSSSYLAWYQQKPGQAPRLLIY |
| | | GTSSRATGISDRFSGSGSGTDFTLTISRLEPEDFAVYYCQHYGNSPPKFTFGP |
| | | GTKLEIKTTTPAPRPPTPAPTIASQPLSLRPEACRPAAGGAVHTRGLDFACDI |
| | | YIWAPLAGTCGVLLLSLVITLYCKRGRKKLLYIFKQPFMRPVQTTQEEDGCSC |
| | | RFPEEEEGGCELRVKFSRSADAPAYKQGQNQLYNELNLGRREEYDVLDKRRGR |
| | | DPEMGGKPRRKNPQEGLYNELQKDKMAEAYSEIGMKGERRRGKGHDGLYQGLS |
| | | TATKDTYDALHMQALPPR |
| BCMA_EBB- | 253 | ATGGCCCTCCCTGTCACCGCCCTGCTGCTTCCGCTGGCTCTTCTGCTCCACGC |
| C1981-C3-nt | | CGCTCGGCCCCAAGTGCAGCTCGTGGAGTCAGGCGGAGGACTGGTGCAGCCCG |
| Full CART | | GGGGCTCCCTGAGACTTTCCTGCGCGGCATCGGGTTTTACCTTCTCCTCCTAT |
| | | GCTATGTCCTGGGTGCGCCAGGCCCCGGGAAAGGGACTGGAATGGGTGTCCGC |
| | | AATCAGCGGTAGCGGGGGCTCAACATACTACGCCGACTCCGTCAAGGGTCGCT |
| | | TCACTATTTCCCGGGACAACTCCAAGAATACCCTGTACCTCCAAATGAACAGC |
| | | CTCAGGGCCGAGGATACTGCCGTGTACTACTGCGCCAAAGTCGGATACGATAG |
| | | CTCCGGTTACTACCGGGACTACTACGGAATGGACGTGTGGGGACAGGGCACCA |
| | | CCGTGACCGTGTCAAGCGGCGGAGGCGGTTCAGGAGGGGGAGGCTCCGGCGGT |
| | | GGAGGGTCCGAAATCGTCCTGACTCAGTCGCCTGGCACTCTGTCGTTGTCCCC |
| | | GGGGGAGCGCGCTACCCTGTCGTGTCGGGCGTCGCAGTCCGTGTCGAGCTCCT |
| | | ACCTCGCGTGGTACCAGCAGAAGCCCGGACAGGCCCCTAGACTTCTGATCTAC |
| | | GGCACTTCTTCACGCGCCACCGGGATCAGCGACAGGTTCAGCGGCTCCGGCTC |
| | | CGGGACCGACTTCACCCTGACCATTAGCCGGCTGGAGCCTGAAGATTTCGCCG |
| | | TGTATTACTGCCAACACTACGGAAACTCGCCGCCAAAGTTCACGTTCGGACCC |
| | | GGAACCAAGCTGGAAATCAAGACCACTACCCCAGCACCGAGGCCACCCACCCC |
| | | GGCTCCTACCATCGCCTCCCAGCCTCTGTCCCTGCGTCCGGAGGCATGTAGAC |
| | | CCGCAGCTGGTGGGGCCGTGCATACCCGGGGTCTTGACTTCGCCTGCGATATC |
| | | TACATTTGGGCCCCTCTGGCTGGTACTTGCGGGGTCCTGCTGCTTTCACTCGT |
| | | GATCACTCTTTACTGTAAGCGCGGTCGGAAGAAGCTGCTGTACATCTTTAAGC |
| | | AACCCTTCATGAGGCCTGTGCAGACTACTCAAGAGGAGGACGGCTGTTCATGC |
| | | CGGTTCCCAGAGGAGGAGGAAGGCGGCTGCGAACTGCGCGTGAAATTCAGCCG |
| | | CAGCGCAGATGCTCCAGCCTACAAGCAGGGGCAGAACCAGCTCTACAACGAAC |
| | | TCAATCTTGGTCGGAGAGAGGAGTACGACGTGCTGGACAAGCGGAGAGGACGG |
| | | GACCCAGAAATGGGCGGGAAGCCGCGCAGAAAGAATCCCCAAGAGGGCCTGTA |
| | | CAACGAGCTCCAAAAGGATAAGATGGCAGAAGCCTATAGCGAGATTGGTATGA |
| | | AAGGGGAACGCAGAAGAGGCAAAGGCCACGACGGACTGTACCAGGGACTCAGC |
| | | ACCGCCACCAAGGACACCTATGACGCTCTTCACATGCAGGCCCTGCCGCCTCG |
| | | G |

BCMA_EBB-C1978-G4

| | | |
|---|---|---|
| BCMA_EBB- | 149 | EVQLVESGGGLVQPGGSLRLSCAASGFTFSSYAMSWVRQAPGKGLEWVSAISG |
| C1978-G4-aa | | SGGSTYYADSVKGRFTISRDNSKNTLYLQMNSLRAEDTAVYYCAKMGWSSGYL |
| ScFv domain | | GAFDIWGQGTTVTVSSGGGGSGGGGSGGGGSEIVLTQSPGTLSLSPGERATLS |
| | | CRASQSVASSFLAWYQQKPGQAPRLLIYGASGRATGIPDRFSGSGSGTDFTLT |
| | | ISRLEPEDFAVYYCQHYGGSPRLTFGGGTKVDIK |
| BCMA_EBB- | 170 | GAAGTCCAACTGGTGGAGTCCGGGGGAGGGCTCGTGCAGCCCGGAGGCAGCCT |
| C1978-G4-nt | | TCGGCTGTCGTGCGCCGCCTCCGGGTTCACGTTCTCATCCTACGCGATGTCGT |
| ScFv domain | | GGGTCAGACAGGCACCAGGAAAGGGACTGGAATGGGTGTCCGCCATTAGCGGC |
| | | TCCGGCGGTAGCACCTACTATGCCGACTCAGTGAAGGGAAGGTTCACTATCTC |
| | | CCGCGACAACAGCAAGAACACCCTGTACCTCCAAATGAACTCTCTGCGGGCCG |
| | | AGGATACCGCGGTGTACTATTGCGCCAAGATGGGTTGGTCCAGCGGATACTTG |
| | | GGAGCCTTCGACATTTGGGGACAGGGCACTACTGTGACCGTGTCCTCCGGGGG |
| | | TGGCGGATCGGGAGGCGGCGGCTCGGGTGGAGGGGGTTCCGAAATCGTGTTGA |
| | | CCCAGTCACCGGGAACCCTCTCGCTGTCCCCGGGAGAACGGGCTACACTGTCA |
| | | TGTAGAGCGTCCCAGTCCGTGGCTTCCTCGTTCCTGGCCTGGTACCAGCAGAA |
| | | GCCGGGACAGGCACCCCGCCTGCTCATCTACGGAGCCAGCGGCCGGGCGACCG |
| | | GCATCCCTGACCGCTTCTCCGGTTCCGGCTCGGGCACCGACTTTACTCTGACC |
| | | ATTAGCAGGCTTGAGCCCGAGGATTTTGCCGTGTACTACTGCCAACACTACGG |
| | | GGGGAGCCCTCGCCTGACCTTCGGAGGCGGAACTAAGGTCGATATCAAAA |
| BCMA_EBB- | 191 | EVQLVESGGGLVQPGGSLRLSCAASGFTFSSYAMSWVRQAPGKGLEWVSAISG |
| C1978-G4-aa | | SGGSTYYADSVKGRFTISRDNSKNTLYLQMNSLRAEDTAVYYCAKMGWSSGYL |
| VH | | GAFDIWGQGTTVTVSS |
| BCMA_EBB- | 212 | EIVLTQSPGTLSLSPGERATLSCRASQSVASSFLAWYQQKPGQAPRLLIYGAS |
| C1978-G4-aa | | GRATGIPDRFSGSGSGTDFTLTISRLEPEDFAVYYCQHYGGSPRLTFGGGTKV |
| VL | | DIK |
| BCMA_EBB- | 233 | MALPVTALLLPLALLLHAARPEVQLVESGGGLVQPGGSLRLSCAASGFTFSSY |
| C1978-G4-aa | | AMSWVRQAPGKGLEWVSAISGSGGSTYYADSVKGRFTISRDNSKNTLYLQMNS |
| Full CART | | LRAEDTAVYYCAKMGWSSGYLGAFDIWGQGTTVTVSSGGGGSGGGGSGGGGSE |
| | | IVLTQSPGTLSLSPGERATLSCRASQSVASSFLAWYQQKPGQAPRLLIYGASG |
| | | RATGIPDRFSGSGSGTDFTLTISRLEPEDFAVYYCQHYGGSPRLTFGGGTKVD |
| | | IKTTTPAPRPPTPAPTIASQPLSLRPEACRPAAGGAVHTRGLDFACDIYIWAP |
| | | LAGTCGVLLLSLVITLYCKRGRKKLLYIFKQPFMRPVQTTQEEDGCSCRFPEE |
| | | EEGGCELRVKFSRSADAPAYKQGQNQLYNELNLGRREEYDVLDKRRGRDPEMG |
| | | GKPRRKNPQEGLYNELQKDKMAEAYSEIGMKGERRRGKGHDGLYQGLSTATKD |
| | | TYDALHMQALPPR |
| BCMA_EBB- | 254 | ATGGCCCTCCCTGTCACCGCCCTGCTGCTTCCGCTGGCTCTTCTGCTCCACGC |
| C1978-G4-nt | | CGCTCGGCCCGAAGTCCAACTGGTGGAGTCCGGGGGAGGGCTCGTGCAGCCCG |
| Full CART | | GAGGCAGCCTTCGGCTGTCGTGCGCCGCCTCCGGGTTCACGTTCTCATCCTAC |
| | | GCGATGTCGTGGGTCAGACAGGCACCAGGAAAGGGACTGGAATGGGTGTCCGC |
| | | CATTAGCGGCTCCGGCGGTAGCACCTACTATGCCGACTCAGTGAAGGGAAGGT |
| | | TCACTATCTCCCGCGACAACAGCAAGAACACCCTGTACCTCCAAATGAACTCT |
| | | CTGCGGGCCGAGGATACCGCGGTGTACTATTGCGCCAAGATGGGTTGGTCCAG |
| | | CGGATACTTGGGAGCCTTCGACATTTGGGGACAGGGCACTACTGTGACCGTGT |
| | | CCTCCGGGGGTGGCGGATCGGGAGGCGGCGGCTCGGGTGGAGGGGGTTCCGAA |
| | | ATCGTGTTGACCCAGTCACCGGGAACCCTCTCGCTGTCCCCGGGAGAACGGGC |
| | | TACACTGTCATGTAGAGCGTCCCAGTCCGTGGCTTCCTCGTTCCTGGCCTGGT |
| | | ACCAGCAGAAGCCGGGACAGGCACCCCGCCTGCTCATCTACGGAGCCAGCGGC |
| | | CGGGCGACCGGCATCCCTGACCGCTTCTCCGGTTCCGGCTCGGGCACCGACTT |
| | | TACTCTGACCATTAGCAGGCTTGAGCCCGAGGATTTTGCCGTGTACTACTGCC |
| | | AACACTACGGGGGGAGCCCTCGCCTGACCTTCGGAGGCGGAACTAAGGTCGAT |
| | | ATCAAAACCACTACCCCAGCACCGAGGCCACCCACCCCGGCTCCTACCATCGC |
| | | CTCCCAGCCTCTGTCCCTGCGTCCGGAGGCATGTAGACCCGCAGCTGGTGGGG |
| | | CCGTGCATACCCGGGGTCTTGACTTCGCCTGCGATATCTACATTTGGGCCCCT |
| | | CTGGCTGGTACTTGCGGGGTCCTGCTGCTTTCACTCGTGATCACTCTTTACTG |
| | | TAAGCGCGGTCGGAAGAAGCTGCTGTACATCTTTAAGCAACCCTTCATGAGGC |
| | | CTGTGCAGACTACTCAAGAGGAGGACGGCTGTTCATGCCGGTTCCCAGAGGAG |
| | | GAGGAAGGCGGCTGCGAACTGCGCGTGAAATTCAGCCGCAGCGCAGATGCTCC |
| | | AGCCTACAAGCAGGGGCAGAACCAGCTCTACAACGAACTCAATCTTGGTCGGA |
| | | GAGAGGAGTACGACGTGCTGGACAAGCGGAGAGGACGGGACCCAGAAATGGGC |
| | | GGGAAGCCGCGCAGAAAGAATCCCCAAGAGGGCCTGTACAACGAGCTCCAAAA |
| | | GGATAAGATGGCAGAAGCCTATAGCGAGATTGGTATGAAAGGGGAACGCAGAA |
| | | GAGGCAAAGGCCACGACGGACTGTACCAGGGACTCAGCACCGCCACCAAGGAC |
| | | ACCTATGACGCTCTTCACATGCAGGCCCTGCCGCCTCGG |

TABLE 26
Amino acid sequences of exemplary BCMA binding domains

| | | |
|---|---|---|
| ER26 | | |
| SEQ ID NO: | J6M0 VH | QVQLVQSGAEVKKPGSSVKVSCKASGGTFSNYWMHWVRQ |
| 1118 | | APGQGLEWMGATYRGHSDTYYNQKFKGRVTITADKSTSTA |
| | | YMELSSLRSEDTAVYYCARGAIYDGYDVLDNWGQGTLVTV |
| | | SS |
| SEQ ID NO: | J6M0 VL | DIQMTQSPSSLSASVGDRVTITCSASQDISNYLNWYQQKPGK |
| 1119 | | APKLLIYYTSNLHSGVPSRFSGSGSGTDFTLTISSLQPEDFATY |
| | | YCQQYRKLPWTFGQGTKLEIKR |
| SEQ ID NO: | Anti-BCMA | QVQLVQSGAEVKKPGSSVKVSCKASGGTFSNYWMHWVRQ |
| 1120 | heavy chain of | APGQGLEWMGATYRGHSDTYYNQKFKGRVTITADKSTSTA |
| | ER26 | YMELSSLRSEDTAVYYCARGAIYNGYDVLDNWGQGTLVTV |
| | | SSASTKGPSVFPLAPSSKSTSGGTAALGCLVKDYFPEPVTVS |
| | | WNSGALTSGVHTFPAVLQSSGLYSLSSVVTVPSSSLGTQTYI |
| | | CNVNHKPSNTKVDKRVEPKSCDKTHTCPPCPAPELLGGPSVF |
| | | LFPPKPKDTLMISRTPEVTCVVVAVSHEDPEVKFNWYVDGV |
| | | EVHNAKTKPREEQYNSTYRVVSVLTVLHQDWLNGKEYKCK |
| | | VSNKALAAPIEKTISKAKGQPREPQVCTLPPSREEMTKNQVS |
| | | LSCAVKGFYPSDIAVEWESNGQPENNYKTTPPVLDSDGSFFL |
| | | VSKLTVDKSRWQQGNVFSCSVMHEALHNHYTQKSLSLSPG |
| | | X, wherein X is K or absent |
| SEQ ID NO: | Anti-BCMA | DIQMTQSPSSLSASVGDRVTITCSASQDISNYLNWYQQKPGK |
| 1121 | light chain of | APKLLIYYTSNLHSGVPSRFSGSGSGTDFTLTISSLQPEDFATY |
| | ER26 | YCQQYRKLPWTFGQGTKLEIKRTVAAPSVFIFPPSDEQLKSG |
| | | TASVVCLLNNFYPREAKVQWKVDNALQSGNSQESVTEQDS |
| | | KDSTYSLSSTLTLSKADYEKHKVYACEVTHQGLSSPVTKSFN |
| | | RGEC |
| BQ76 | | |
| SEQ ID NO: | 17A5 VH | EVQLLESGGGLVQPGGSLRLSCAASGFTFSSYAMSWVRQAP |
| 1123 | | GKGLEWVSAISGSGGSTYYADSVKGRFTISRDNSKNTLYLQ |
| | | MNSLRAEDTAVYYCAKVAPYFAPFDYWGQGTLVTVSS |
| SEQ ID NO: | 17A5 VL | EIVLTQSPGTLSLSPGERATLSCRASQSVSSSYLAWYQQKPG |
| 1124 | | QAPRLLIYGASSRATGIPDRFSGSGSGTDFTLTISRLEPEDFAV |
| | | YYCQQYGNPPLYTFGQGTKVEIK |
| SEQ ID NO: | Anti-BCMA | EVQLLESGGGLVQPGGSLRLSCAASGFTFSSYAMSWVRQAP |
| 1125 | heavy chain of | GKGLEWVSAISGSGGSTYYADSVKGRFTISRDNSKNTLYLQ |
| | BQ76 | MNSLRAEDTAVYYCAKVAPYFAPFDYWGQGTLVTVSSAST |
| | | KGPSVFPLAPSSKSTSGGTAALGCLVKDYFPEPVTVSWNSGA |
| | | LTSGVHTFPAVLQSSGLYSLSSVVTVPSSSLGTQTYICNVNH |
| | | KPSNTKVDKRVEPKSCDKTHTCPPCPAPELLGGPSVFLFPPKP |
| | | KDTLMISRTPEVTCVVVDVSHEDPEVKFNWYVDGVEVHNA |
| | | KTKPREEQYASTYRVVSVLTVLHQDWLNGKEYKCKVSNKA |
| | | LPAPIEKTISKAKGQPREPQVCTLPPSREEMTKNQVSLSCAVK |
| | | GFYPSDIAVEWESNGQPENNYKTTPPVLDSDGSFFLVSKLTV |
| | | DKSRWQQGNVFSCSVMHEALHNHYTQKSLSLSPGX, wherein |
| | | X is K or absent |
| SEQ ID NO: | Anti-BCMA | EIVLTQSPGTLSLSPGERATLSCRASQSVSSSYLAWYQQKPG |
| 1126 | light chain of | QAPRLLIYGASSRATGIPDRFSGSGSGTDFTLTISRLEPEDFAV |
| | BQ76 | YYCQQYGNPPLYTFGQGTKVEIKRTVAAPSVFIFPPSDEQLK |
| | | SGTASVVCLLNNFYPREAKVQWKVDNALQSGNSQESVTEQ |
| | | DSKDSTYSLSSTLTLSKADYEKHKVYACEVTHQGLSSPVTKS |
| | | FNRGEC |
| BU76 | | |
| SEQ ID NO: | C11D5 VH | QIQLVQSGPELKKPGETVKISCKASGYTFTDYSINWVKRAPG |
| 1127 | | KGLKWMGWINTETREPAYAYDFRGRFAFSLETSASTAYLQI |
| | | NNLKYEDTATYFCALDYSYAMDYWGQGTSVTVSS |
| SEQ ID NO: | C11D5 VL | DIVLTQSPPSLAMSLGKRATISCRASESVTILGSHLIHWYQQK |
| 1128 | | PGQPPTLLIQLASNVQTGVPARFSGSGSRTDFTLTIDPVEEDD |
| | | VAVYYCLQSRTIPRTFGGGTKLEIK |
| SEQ ID NO: | Anti-BCMA | QIQLVQSGPELKKPGETVKISCKASGYTFTDYSINWVKRAPG |
| 1129 | heavy chain of | KGLKWMGWINTETREPAYAYDFRGRFAFSLETSASTAYLQI |
| | BU76 | NNLKYEDTATYFCALDYSYAMDYWGQGTSVTVSSASTKGP |
| | | SVFPLAPSSKSTSGGTAALGCLVKDYFPEPVTVSWNSGALTS |
| | | GVHTFPAVLQSSGLYSLSSVVTVPSSSLGTQTYICNVNHKPS |
| | | NTKVDKRVEPKSCDKTHTCPPCPAPELLGGPSVFLFPPKPKD |
| | | TLMISRTPEVTCVVVDVSHEDPEVKFNWYVDGVEVHNAKT |
| | | KPREEQYASTYRVVSVLTVLHQDWLNGKEYKCKVSNKALP |
| | | APIEKTISKAKGQPREPQVCTLPPSREEMTKNQVSLSCAVKG |
| | | FYPSDIAVEWESNGQPENNYKTTPPVLDSDGSFFLVSKLTVD |
| | | KSRWQQGNVFSCSVMHEALHNHYTQKSLSLSPGX, wherein |
| | | X is K or absent |
| SEQ ID NO: | Anti-BCMA | DIVLTQSPASLAMSLGKRATISCRASESVSVIGAHLIHWYQQ |
| 1130 | light chain of | KPGQPPKLLIYLASNLETGVPARFSGSGSGTDFTLTIDPVEED |
| | BU76 | DVAIYSCLQSRIFPRTFGGGTKLEIKRTVAAPSVFIFPPSDEQL |
| | | KSGTASVVCLLNNFYPREAKVQWKVDNALQSGNSQESVTE |
| | | QDSKDSTYSLSSTLTLSKADYEKHKVYACEVTHQGLSSPVT |
| | | KSFNRGEC |
| EE11 | | |
| SEQ ID NO: | 83A10 VH | EVQLLESGGGLVQPGGSLRLSCAASGFTFSSYAMSWVRQAP |
| 1131 | | GKGLEWVSAISGSGGSTYYADSVKGRFTISRDNSKNTLYLQ |
| | | MNSLRAEDTAVYYCAKVLGWFDYWGQGTLVTVSS |
| SEQ ID NO: | 83A10 VL | EIVLTQSPGTLSLSPGERATLSCRASQSVSSSYLAWYQQKPG |
| 1132 | | QAPRLLIYGASSRATGIPDRFSGSGSGTDFTLTISRLEPEDFAV |
| | | YYCQQYGYPPDFTFGQGTKVEIK |
| SEQ ID NO: | Anti-BCMA | EVQLLESGGGLVQPGGSLRLSCAASGFTFSSYAMSWVRQAP |
| 1133 | scFv-Fc of | GKGLEWVSAISGSGGSTYYADSVKGRFTISRDNSKNTLYLQ |
| | EE11 | MNSLRAEDTAVYYCAKVLGWFDYWGQGTLVTVSSGGGGS |
| | | GGGGSGGGGSGGGGSEIVLTQSPGTLSLSPGERATLSCRASQ |
| | | SVSSSYLAWYQQKPGQAPRLLIYGASSRATGIPDRFSGSGSG |
| | | TDFTLTISRLEPEDFAVYYCQQYGYPPDFTFGQGTKVEIKGG |
| | | GGSDKTHTCPPCPAPELLGGPSVFLFPPKPKDTLMISRTPEVT |
| | | CVVVAVSHEDPEVKFNWYVDGVEVHNAKTKPREEQYNSTY |
| | | RVVSVLTVLHQDWLNGKEYKCKVSNKALAAPIEKTISKAKG |
| | | QPREPQVYTLPPCRDELTKNQVSLWCLVKGFYPSDIAVEWE |
| | | SNGQPENNYKTTPPVLDSDGSFFLYSKLTVDKSRWQQGNVF |
| | | SCSVMHEALHNHYTQKSLSLSPGX, wherein |
| | | X is K or absent |
| EM90 | | |
| SEQ ID NO: | Comment | QAVVTQEPSLTVSPGGTVTLTCGSSTGAVTTSNYANWVQEK |
| 1153 | light chain of | PGQAFRGLIGGTNKRAPGTPARFSGSLLGGKAALTLSGAQPE |
| | EM90 | DEAEYYCALWYSNLWVFGGGTKLTVLGQPKAAPSVTLFPPS |
| | | SEELQANKATLVCLISDFYPGAVTVAWKADSSPVKAGVETT |
| | | TPSKQSNNKYAASSYLSLTPEQWKSHRSYSCQVTHEGSTVE |
| | | KTVAPTECS |
| SEQ ID NO: | Anti-BCMA | EVQLVESGGGLVKPGGSLRLSCAASGFTFSNSGMIWVRQAP |
| 1154 | heavy chain of | GKGLEWVGHIRSKTDGGTTDYAAPVKGRFTISRDDSKNTLY |
| | EM90 | LQMNSLKTEDTAVYYCTTGGSGSFDYWGQGTLVTVSSAST |
| | | KGPSVFPLAPSSKSTSGGTAALGCLVKDYFPEPVTVSWNSGA |
| | | LTSGVHTFPAVLQSSGLYSLSSVVTVPSSSLGTQTYICNVNH |
| | | KPSNTKVDKRVEPKSCDKTHTCPPCPAPEAAGGPSVFLFPPK |
| | | PKDTLMISRTPEVTCVVVDVSHEDPEVKFNWYVDGVEVHN |
| | | AKTKPREEQYNSTYRVVSVLTVLHQDWLNGKEYKCKVSNK |
| | | ALPAPIEKTISKAKGQPREPQVCTLPPSREEMTKNQVSLSCAV |
| | | KGFYPSDIAVEWESNGQPENNYKTTPPVLDSDGSFFLVSKLT |
| | | VDKSRWQQGNVFSCSVMHEALHNHYTQKSLSLSPGX, |
| | | wherein X is K or absent |

[0477] Additional exemplary BCMA-targeting sequences that can be used in the anti-BCMA CAR constructs are disclosed in WO 2017/021450, WO 2017/011804, WO 2017/025038, WO 2016/090327, WO 2016/130598, WO 2016/210293, WO 2016/090320, WO 2016/014789, WO 2016/094304, WO 2016/154055, WO 2015/166073, WO 2015/188119, WO 2015/158671, U.S. Pat. Nos. 9,243,058, 8,920,776, 9,273,141, 7,083,785, 9,034,324, US 2007/0049735, US 2015/0284467, US 2015/0051266, US 2015/0344844, US 2016/0131655, US 2016/0297884, US 2016/0297885, US 2017/0051308, US 2017/0051252, US 2017/0051252, WO 2016/020332, WO 2016/087531, WO 2016/079177, WO 2015/172800, WO 2017/008169, U.S. Pat. No. 9,340,621, US 2013/0273055, US 2016/0176973, US 2015/0368351, US 2017/0051068, US 2016/0368988, US 2015/0232557, herein incorporated by reference in their entirety.

[0478] In embodiments, additional exemplary BCMA CAR constructs are generated using the VH and VL sequences from PCT Publication WO2012/0163805 (the contents of which are hereby incorporated by reference in its entirety). Exemplary BCMA CAR constructs and their corresponding DNA ID are shown below in Table 3.

TABLE 3
Tool CAR construct IDs

| | | |
|---|---|---|
| Nickname | Novartis ID | DNA2.0 ID |

| | |
|---|---|
| BCMA-3NP | 126022 |
| BCMA-4NP | 126021 |

[0479] In embodiments, additional exemplary BCMA CAR constructs can also be generated using the VH and VL sequences found in Table 16. The amino acid sequences of exemplary scFv domains comprising the VH and VL domains and a linker sequence, and full-length CARs are also found in Table 16.

TABLE 16
Additional exemplary BCMA CAR sequences

| | | SEQ |
|---|---|---|
| | | ID |
| Name | Sequence | NO: |
| A7D12.2 | QIQLVQSGPDLKKPGETVKLSCKASGYTFTNFGMNWVKQAPGKGFKWMAWINTYT | 255 |
| VH | GESYFADDFKGRFAFSVETSATTAYLQINNLKTEDTATYFCARGEIYYGYDGGFA | |
| | YWGQGTLVTVSA | |
| A7D12.2 | DVVMTQSHRFMSTSVGDRVSITCRASQDVNTAVSWYQQKPGQSPKLLIFSASYRY | 259 |
| VL | TGVPDRFTGSGSGADFTLTISSVQAEDLAVYYCQQHYSTPWTFGGGTKLDIK | |
| A7D12.2 | QIQLVQSGPDLKKPGETVKLSCKASGYTFTNFGMNWVKQAPGKGFKWMAWINTYT | 263 |
| scFv | GESYFADDFKGRFAFSVETSATTAYLQINNLKTEDTATYFCARGEIYYGYDGGFA | |
| domain | YWGQGTLVTVSAGGGGSGGGGSGGGGSDVVMTQSHRFMSTSVGDRVSITCRASQD | |
| | VNTAVSWYQQKPGQSPKLLIFSASYRYTGVPDRFTGSGSGADFTLTISSVQAEDL | |
| | AVYYCQQHYSTPWTFGGGTKLDIK | |
| A7D12.2 | QIQLVQSGPDLKKPGETVKLSCKASGYTFTNFGMNWVKQAPGKGFKWMAWINTYT | 267 |
| Full | GESYFADDFKGRFAFSVETSATTAYLQINNLKTEDTATYFCARGEIYYGYDGGFA | |
| CART | YWGQGTLVTVSAGGGGSGGGGSGGGGSDVVMTQSHRFMSTSVGDRVSITCRASQD | |
| | VNTAVSWYQQKPGQSPKLLIFSASYRYTGVPDRFTGSGSGADFTLTISSVQAEDL | |
| | AVYYCQQHYSTPWTFGGGTKLDIKTTTPAPRPPTPAPTIASQPLSLRPEACRPAA | |
| | GGAVHTRGLDFACDIYIWAPLAGTCGVLLLSLVITLYCKRGRKKLLYIFKQPFMR | |
| | PVQTTQEEDGCSCRFPEEEEGGCELRVKFSRSADAPAYKQGQNQLYNELNLGRRE | |
| | EYDVLDKRRGRDPEMGGKPRRKNPQEGLYNELQKDKMAEAYSEIGMKGERRRGKG | |
| | HDGLYQGLSTATKDTYDALHMQALPPR | |
| C11D5.3 | QIQLVQSGPELKKPGETVKISCKASGYTFTDYSINWVKRAPGKGLKWMGWINTET | 256 |
| VH | REPAYAYDFRGRFAFSLETSASTAYLQINNLKYEDTATYFCALDYSYAMDYWGQG | |
| | TSVTVSS | |
| C11D5.3 | DIVLTQSPASLAMSLGKRATISCRASESVSVIGAHLIHWYQQKPGQPPKLLIYLA | 260 |
| VL | SNLETGVPARFSGSGSGTDFTLTIDPVEEDDVAIYSCLQSRIFPRTFGGGTKLEI | |
| | K | |
| C11D5.3 | QIQLVQSGPELKKPGETVKISCKASGYTFTDYSINWVKRAPGKGLKWMGWINTET | 264 |
| scFv | REPAYAYDFRGRFAFSLETSASTAYLQINNLKYEDTATYFCALDYSYAMDYWGQG | |
| domain | TSVTVSSGGGGSGGGGSGGGGSQIQLVQSGPELKKPGETVKISCKASGYTFTDYS | |
| | INWVKRAPGKGLKWMGWINTETREPAYAYDFRGRFAFSLETSASTAYLQINNLKY | |
| | EDTATYFCALDYSYAMDYWGQGTSVTVSS | |
| C11D5.3 | QIQLVQSGPELKKPGETVKISCKASGYTFTDYSINWVKRAPGKGLKWMGWINTET | 268 |
| Full | REPAYAYDFRGRFAFSLETSASTAYLQINNLKYEDTATYFCALDYSYAMDYWGQG | |
| CART | TSVTVSSGGGGSGGGGSGGGGSQIQLVQSGPELKKPGETVKISCKASGYTFTDYS | |
| | INWVKRAPGKGLKWMGWINTETREPAYAYDFRGRFAFSLETSASTAYLQINNLKY | |
| | EDTATYFCALDYSYAMDYWGQGTSVTVSSTTTPAPRPPTPAPTIASQPLSLRPEA | |
| | CRPAAGGAVHTRGLDFACDIYIWAPLAGTCGVLLLSLVITLYCKRGRKKLLYIFK | |
| | QPFMRPVQTTQEEDGCSCRFPEEEEGGCELRVKFSRSADAPAYKQGQNQLYNELN | |
| | LGRREEYDVLDKRRGRDPEMGGKPRRKNPQEGLYNELQKDKMAEAYSEIGMKGER | |
| | RRGKGHDGLYQGLSTATKDTYDALHMQALPPR | |
| C12A3.2 | QIQLVQSGPELKKPGETVKISCKASGYTFRHYSMNWVKQAPGKGLKWMGRINTES | 257 |
| VH | GVPIYADDFKGRFAFSVETSASTAYLVINNLKDEDTASYFCSNDYLYSLDFWGQG | |
| | TALTVSS | |
| C12A3.2 | DIVLTQSPPSLAMSLGKRATISCRASESVTILGSHLIYWYQQKPGQPPTLLIQLA | 261 |
| VL | SNVQTGVPARFSGSGSRTDFTLTIDPVEEDDVAVYYCLQSRTIPRTFGGGTKLEI | |
| | K | |
| C12A3.2 | QIQLVQSGPELKKPGETVKISCKASGYTFRHYSMNWVKQAPGKGLKWMGRINTES | 265 |
| scFv | GVPIYADDFKGRFAFSVETSASTAYLVINNLKDEDTASYFCSNDYLYSLDFWGQG | |
| domain | TALTVSSGGGGSGGGGSGGGGSDIVLTQSPPSLAMSLGKRATISCRASESVTILG | |
| | SHLIYWYQQKPGQPPTLLIQLASNVQTGVPARFSGSGSRTDFTLTIDPVEEDDVA | |
| | VYYCLQSRTIPRTFGGGTKLEIK | |
| C12A3.2 | QIQLVQSGPELKKPGETVKISCKASGYTFRHYSMNWVKQAPGKGLKWMGRINTES | 269 |
| Full | GVPIYADDFKGRFAFSVETSASTAYLVINNLKDEDTASYFCSNDYLYSLDFWGQG | |
| CART | TALTVSSGGGGSGGGGSGGGGSDIVLTQSPPSLAMSLGKRATISCRASESVTILG | |
| | SHLIYWYQQKPGQPPTLLIQLASNVQTGVPARFSGSGSRTDFTLTIDPVEEDDVA | |
| | VYYCLQSRTIPRTFGGGTKLEIKTTTPAPRPPTPAPTIASQPLSLRPEACRPAAG | |
| | GAVHTRGLDFACDIYIWAPLAGTCGVLLLSLVITLYCKRGRKKLLYIFKQPFMRP | |
| | VQTTQEEDGCSCRFPEEEEGGCELRVKFSRSADAPAYKQGQNQLYNELNLGRREE | |
| | YDVLDKRRGRDPEMGGKPRRKNPQEGLYNELQKDKMAEAYSEIGMKGERRRGKGH | |
| | DGLYQGLSTATKDTYDALHMQALPPR | |
| C13F12.1 | QIQLVQSGPELKKPGETVKISCKASGYTFTHYSMNWVKQAPGKGLKWMGRINTET | 258 |
| VH | GEPLYADDFKGRFAFSLETSASTAYLVINNLKNEDTATFFCSNDYLYSCDYWGQG | |
| | TTLTVSS | |
| C13F12.1 | DIVLTQSPPSLAMSLGKRATISCRASESVTILGSHLIYWYQQKPGQPPTLLIQLA | 262 |
| VL | SNVQTGVPARFSGSGSRTDFTLTIDPVEEDDVAVYYCLQSRTIPRTFGGGTKLEI | |
| | K | |
| C13F12.1 | QIQLVQSGPELKKPGETVKISCKASGYTFTHYSMNWVKQAPGKGLKWMGRINTET | 266 |
| scFv | GEPLYADDFKGRFAFSLETSASTAYLVINNLKNEDTATFFCSNDYLYSCDYWGQG | |
| domain | TTLTVSSGGGGSGGGGSGGGGSDIVLTQSPPSLAMSLGKRATISCRASESVTILG | |
| | SHLIYWYQQKPGQPPTLLIQLASNVQTGVPARFSGSGSRTDFTLTIDPVEEDDVA | |
| | VYYCLQSRTIPRTFGGGTKLEIK | |
| C13F12.1 | QIQLVQSGPELKKPGETVKISCKASGYTFTHYSMNWVKQAPGKGLKWMGRINTET | 270 |
| Full | GEPLYADDFKGRFAFSLETSASTAYLVINNLKNEDTATFFCSNDYLYSCDYWGQG | |
| CART | TTLTVSSGGGGSGGGGSGGGGSDIVLTQSPPSLAMSLGKRATISCRASESVTILG | |
| | SHLIYWYQQKPGQPPTLLIQLASNVQTGVPARFSGSGSRTDFTLTIDPVEEDDVA | |
| | VYYCLQSRTIPRTFGGGTKLEIKTTTPAPRPPTPAPTIASQPLSLRPEACRPAAG | |
| | GAVHTRGLDFACDIYIWAPLAGTCGVLLLSLVITLYCKRGRKKLLYIFKQPFMRP | |
| | VQTTQEEDGCSCRFPEEEEGGCELRVKFSRSADAPAYKQGQNQLYNELNLGRREE | |
| | YDVLDKRRGRDPEMGGKPRRKNPQEGLYNELQKDKMAEAYSEIGMKGERRRGKGH | |
| | DGLYQGLSTATKDTYDALHMQALPPR | |

[0480] In embodiments, the nucleic acid sequence of an exemplary humanized anti-BCMA scFv in which VH precedes the VL (H2L, e.g., pBCMA 2 and pBCMA 4) is as follows:

(SEQ ID NO: 272)

CAGGTGCAGCTGGTCCAGAGCGGCGCCGAAGTGAAGAAGCCCGGCAGCTC
CGTGAAAGTGAGCTGCAAGGCCAGCGGCGGCACCTTCAGCAACTACTGGA
TGCACTGGGTGAGGCAGGCCCCCGGACAGGGCCTGGAGTGGATGGGCGCC
ACCTACAGGGGCCACAGCGACACCTACTACAACCAGAAGTTCAAGGGCCG
GGTGACCATCACCGCCGACAAGAGCACCAGCACCGCCTACATGGAACTGA
GCAGCCTCAGGAGCGAGGACACCGCTGTGTATTACTGCGCCAGGGGCGCC
ATCTACAACGGCTACGACGTGCTGGACAACTGGGGCCAGGGCACACTAGT
GACCGTGTCCAGCGGTGGAGGAGGTAGCGGAGGAGGCGGGAGCGGTGGAG
GTGGCTCTGGAGGTGGCGGAAGCGACATCCAGATGACCCAGAGCCCTAGC
TCACTGAGCGCCAGCGTGGGCGACAGGGTGACCATTACCTGCTCCGCCAG
CCAGGACATCAGCAACTACCTGAACTGGTACCAGCAGAAGCCCGGCAAGG
CCCCCAAGCTGCTGATCTACTACACCTCCAACCTGCACTCCGGCGTGCCC
AGCAGGTTCAGCGGAAGCGGCAGCGGCACCGATTTCACCCTGACCATCTC
CAGCCTGCAGCCCGAGGACTTCGCCACCTACTACTGCCAGCAGTACAGGA
AGCTCCCCTGGACTTTCGGCCAGGGCACCAAACTGGAGATCAAGCGT

[0481] The corresponding amino acid sequence for the exemplary humanized anti-BCMA scFv in which Vh precedes the VL (H2L, e.g., pBCMA 2 and pBCMA 4) is as follows:

(SEQ ID NO: 271)

QVQLVQSGAEVKKPGSSVKVSCKASGGTFSNYWMHWVRQAPGQGLEWMGA
TYRGHSDTYYNQKFKGRVTITADKSTSTAYMELSSLRSEDTAVYYCARGA
IYNGYDVLDNWGQGTLVTVSSGGGGSGGGGSGGGGSGGGGSDIQMTQSPS
SLSASVGDRVTITCSASQDISNYLNWYQQKPGKAPKLLIYYTSNLHSGVP
SRFSGSGSGTDFTLTISSLQPEDFATYYCQQYRKLPWTFGQGTKLEIKR

[0482] In embodiments, the nucleic acid sequence of an exemplary humanized anti-BCMA scFv in which VL precedes the VH (L2H, e.g., pBCMA1 and pBCMA3) is as follows:

(SEQ ID NO: 274)

GACATCCAGATGACCCAGAGCCCTAGCTCACTGAGCGCCAGCGTGGGCGA
CAGGGTGACCATTACCTGCTCCGCCAGCCAGGACATCAGCAACTACCTGA
ACTGGTACCAGCAGAAGCCCGGCAAGGCCCCCAAGCTGCTGATCTACTAC
ACCTCCAACCTGCACTCCGGCGTGCCCAGCAGGTTCAGCGGAAGCGGCAG
CGGCACCGATTTCACCCTGACCATCTCCAGCCTGCAGCCCGAGGACTTCG
CCACCTACTACTGCCAGCAGTACAGGAAGCTCCCCTGGACTTTCGGCCAG
GGCACCAAACTGGAGATCAAGCGTGGTGGAGGAGGTAGCGGAGGAGGCGG
GAGCGGTGGAGGTGGCTCTGGAGGTGGCGGAAGCCAGGTGCAGCTGGTCC
AGAGCGGCGCCGAAGTGAAGAAGCCCGGCAGCTCCGTGAAAGTGAGCTGC
AAGGCCAGCGGCGGCACCTTCAGCAACTACTGGATGCACTGGGTGAGGCA
GGCCCCCGGACAGGGCCTGGAGTGGATGGGCGCCACCTACAGGGGCCACA
GCGACACCTACTACAACCAGAAGTTCAAGGGCCGGGTGACCATCACCGCC
GACAAGAGCACCAGCACCGCCTACATGGAACTGAGCAGCCTCAGGAGCGA
GGACACCGCTGTGTATTACTGCGCCAGGGGCGCCATCTACAACGGCTACG
ACGTGCTGGACAACTGGGGCCAGGGCACACTAGTGACCGTGTCCAGC

[0483] The corresponding amino acid sequence of the exemplary humanized anti-BCMA scFv in which VL precedes the VH (L2H, e.g., pBCMA1 and pBCMA3) is as follows:

(SEQ ID NO: 273)

DIQMTQSPSS LSASVGDRVT ITCSASQDIS NYLNWYQQKP
GKAPKLLIYY TSNLHSGVPSRFSGSGSGTD FTLTISSLQP
EDFATYYCQQ YRKLPWTFGQ GTKLEIKRGG
GGSGGGGSGGGGSGGGGSQV QLVQSGAEVK KPGSSVKVSC
KASGGTFSNY WMHWVRQAPG QGLEWMGATYRGHSDTYYNQ
KFKGRVTITA DKSTSTAYME LSSLRSEDTA
VYYCARGAIYNGYDVLDNWGQGTLVTVSS

[0484] The CAR scFv fragments can be cloned into lentiviral vectors to create a full length CAR construct in a single coding frame, and using the EF1 alpha promoter for expression (SEQ ID NO: 11).

[0485] The CAR construct can include a Gly/Ser linker having one or more of the following sequences: GGGGS (SEQ ID NO:25); encompassing 1-6 “Gly Gly Gly Gly Ser” repeating units, e.g., GGGGSGGGGS GGGGSGGGGS GGGGSGGGGS (SEQ ID NO:26); GGGGSGGGGS GGGGSGGGGS (SEQ ID NO:27); GGGGSGGGGS GGGGS (SEQ ID NO:28); GGGS (SEQ ID NO:29); or encompassing 1-10 “Gly Gly Gly Ser” repeating units, e.g., GGGSGGGSGG GSGGGSGGGS GGGSGGGSGG GSGGGSGGGS (SEQ ID NO:38).

[0486] In embodiments, the CAR construct include a poly A sequence, e.g., a sequence encompassing 50-5000 or 100-5000 adenines (e.g., SEQ ID NO:30, SEQ ID NO:33, SEQ ID NO:34 or SEQ ID NO:35), or a sequence encompassing 50-5000 thymines (e.g., SEQ ID NO:31, SEQ ID NO:32). Alternatively, the CAR construct can include, for example, a linker including the sequence GSTSGSGKPGSGEGSTKG (SEQ ID NO: 1108)

### Multispecific CARs

[0487] In some embodiments, the CAR construct is multispecific (e.g., bispecific). In some embodiment, the CAR construct comprises a multispecific antibody molecule (e.g., a bispecific antibody molecule).

[0488] In an embodiment a multispecific antibody molecule is a bispecific antibody molecule. A bispecific antibody has specificity for no more than two antigens. A bispecific antibody molecule is characterized by a first immunoglobulin variable domain sequence which has binding specificity for a first epitope and a second immunoglobulin variable domain sequence that has binding specificity for a second epitope. In an embodiment the first and second epitopes are on the same antigen, e.g., the same protein (or subunit of a multimeric protein). In an embodiment the first and second epitopes overlap. In an embodiment the first and second epitopes do not overlap. In an embodiment the first and second epitopes are on different antigens, e.g., different proteins (or different subunits of a multimeric protein).

[0489] In an embodiment a bispecific antibody molecule comprises a heavy chain variable domain sequence and a light chain variable domain sequence which have binding specificity for a first epitope and a heavy chain variable domain sequence and a light chain variable domain sequence which have binding specificity for a second epitope. In an embodiment a bispecific antibody molecule comprises a half antibody having binding specificity for a first epitope and a half antibody having binding specificity for a second epitope. In an embodiment a bispecific antibody molecule comprises a half antibody, or fragment thereof, having binding specificity for a first epitope and a half antibody, or fragment thereof, having binding specificity for a second epitope. In an embodiment a bispecific antibody molecule comprises a scFv, or fragment thereof, have binding specificity for a first epitope and a scFv, or fragment thereof, have binding specificity for a second epitope.

[0490] In certain embodiments, the antibody molecule is a multi-specific (e.g., a bispecific or a trispecific) antibody molecule. Protocols for generating bispecific or heterodimeric antibody molecules are known in the art; including but not limited to, for example, the “knob in a hole” approach described in, e.g., U.S. Pat. No. 5,731,168; the electrostatic steering Fc pairing as described in, e.g., WO 09/089004, WO 06/106905 and WO 2010/129304; Strand Exchange Engineered Domains (SEED) heterodimer formation as described in, e.g., WO 07/110205; Fab arm exchange as described in, e.g., WO 08/119353, WO 2011/131746, and WO 2013/060867; double antibody conjugate, e.g., by antibody cross-linking to generate a bi-specific structure using a heterobifunctional reagent having an amine-reactive group and a sulfhydryl reactive group as described in, e.g., U.S. Pat. No. 4,433,059; bispecific antibody determinants generated by recombining half antibodies (heavy-light chain pairs or Fabs) from different antibodies through cycle of reduction and oxidation of disulfide bonds between the two heavy chains, as described in, e.g., U.S. Pat. No. 4,444,878; trifunctional antibodies, e.g., three Fab′ fragments cross-linked through sulfhdryl reactive groups, as described in, e.g., U.S. Pat. No. 5,273,743; biosynthetic binding proteins, e.g., pair of scFvs cross-linked through C-terminal tails preferably through disulfide or amine-reactive chemical cross-linking, as described in, e.g., U.S. Pat. No. 5,534,254; bifunctional antibodies, e.g., Fab fragments with different binding specificities dimerized through leucine zippers (e.g., c-fos and c-jun) that have replaced the constant domain, as described in, e.g., U.S. Pat. No. 5,582,996; bispecific and oligospecific mono- and oligovalent receptors, e.g., VH-CH1 regions of two antibodies (two Fab fragments) linked through a polypeptide spacer between the CH1 region of one antibody and the VH region of the other antibody typically with associated light chains, as described in, e.g., U.S. Pat. No. 5,591,828; bispecific DNA-antibody conjugates, e.g., crosslinking of antibodies or Fab fragments through a double stranded piece of DNA, as described in, e.g., U.S. Pat. No. 5,635,602; bispecific fusion proteins, e.g., an expression construct containing two scFvs with a hydrophilic helical peptide linker between them and a full constant region, as described in, e.g., U.S. Pat. No. 5,637,481; multivalent and multispecific binding proteins, e.g., dimer of polypeptides having first domain with binding region of Ig heavy chain variable region, and second domain with binding region of Ig light chain variable region, generally termed diabodies (higher order structures are also encompassed creating for bispecifc, trispecific, or tetraspecific molecules, as described in, e.g., U.S. Pat. No. 5,837,242; minibody constructs with linked VL and VH chains further connected with peptide spacers to an antibody hinge region and CH3 region, which can be dimerized to form bispecific/multivalent molecules, as described in, e.g., U.S. Pat. No. 5,837,821; VH and VL domains linked with a short peptide linker (e.g., 5 or 10 amino acids) or no linker at all in either orientation, which can form dimers to form bispecific diabodies; trimers and tetramers, as described in, e.g., U.S. Pat. No. 5,844,094; String of VH domains (or VL domains in family members) connected by peptide linkages with crosslinkable groups at the C-terminus further associated with VL domains to form a series of FVs (or scFvs), as described in, e.g., U.S. Pat. No. 5,864,019; and single chain binding polypeptides with both a VH and a VL domain linked through a peptide linker are combined into multivalent structures through non-covalent or chemical crosslinking to form, e.g., homobivalent, heterobivalent, trivalent, and tetravalent structures using both scFV or diabody type format, as described in, e.g., U.S. Pat. No. 5,869,620. Additional exemplary multispecific and bispecific molecules and methods of making the same are found, for example, in U.S. Pat. Nos. 5,910,573, 5,932,448, 5,959,083, 5,989,830, 6,005,079, 6,239,259, 6,294,353, 6,333,396, 6,476,198, 6,511,663, 6,670,453, 6,743,896, 6,809,185, 6,833,441, 7,129,330, 7,183,076, 7,521,056, 7,527,787, 7,534,866, 7,612,181, US2002004587A1, US2002076406A1, US2002103345A1, US2003207346A1, US2003211078A1, US2004219643A1, US2004220388A1, US2004242847A1, US2005003403A1, US2005004352A1, US2005069552A1, US2005079170A1, US2005100543A1, US2005136049A1, US2005136051A1, US2005163782A1, US2005266425A1, US2006083747A1, US2006120960A1, US2006204493A1, US2006263367A1, US2007004909A1, US2007087381A1, US2007128150A1, US2007141049A1, US2007154901A1, US2007274985A1, US2008050370A1, US2008069820A1, US2008152645A1, US2008171855A1, US2008241884A1, US2008254512A1, US2008260738A1, US2009130106A1, US2009148905A1, US2009155275A1, US2009162359A1, US2009162360A1, US2009175851A1, US2009175867A1, US2009232811A1, US2009234105A1, US2009263392A1, US2009274649A1, EP346087A2, WO0006605A2, WO02072635A2, WO04081051A1, WO06020258A2, WO2007044887A2, WO2007095338A2, WO2007137760A2, WO2008119353A1, WO2009021754A2, WO2009068630A1, WO9103493A1, WO9323537A1, WO9409131A1, WO9412625A2, WO9509917A1, WO9637621A2, WO9964460A1. The contents of the above-referenced applications are incorporated herein by reference in their entireties.

[0491] Within each antibody or antibody fragment (e.g., scFv) of a bispecific antibody molecule, the VH can be upstream or downstream of the VL. In some embodiments, the upstream antibody or antibody fragment (e.g., scFv) is arranged with its VH (VH₁) upstream of its VL (VL₁) and the downstream antibody or antibody fragment (e.g., scFv) is arranged with its VL (VL₂) upstream of its VH (VH₂), such that the overall bispecific antibody molecule has the arrangement VH₁—VL₁-VL₂-VH₂. In other embodiments, the upstream antibody or antibody fragment (e.g., scFv) is arranged with its VL (VL₁) upstream of its VH (VH₁) and the downstream antibody or antibody fragment (e.g., scFv) is arranged with its VH (VH₂) upstream of its VL (VL₂), such that the overall bispecific antibody molecule has the arrangement VL₁-VH₁-VH₂-VL₂. Optionally, a linker is disposed between the two antibodies or antibody fragments (e.g., scFvs), e.g., between VL₁ and VL₂ if the construct is arranged as VH₁-VL₁-VL₂-VH₂, or between VH₁ and VH₂ if the construct is arranged as VL₁-VH₁-VH₂-VL₂. The linker may be a linker as described herein, e.g., a (Gly₄-Ser)n linker, wherein n is 1, 2, 3, 4, 5, or 6, preferably 4 (SEQ ID NO: 26). In general, the linker between the two scFvs should be long enough to avoid mispairing between the domains of the two scFvs. Optionally, a linker is disposed between the VL and VH of the first scFv. Optionally, a linker is disposed between the VL and VH of the second scFv. In constructs that have multiple linkers, any two or more of the linkers can be the same or different. Accordingly, in some embodiments, a bispecific CAR comprises VLs, VHs, and optionally one or more linkers in an arrangement as described herein.

[0492] In one aspect, the bispecific antibody molecule is characterized by a first immunoglobulin variable domain sequence, e.g., a scFv, which has binding specificity for BCMA, e.g., comprises a scFv as described herein, e.g., as described in Table 1 or Table 16, or comprises the light chain CDRs and/or heavy chain CDRs from a BCMA scFv described herein, and a second immunoglobulin variable domain sequence that has binding specificity for a second epitope on a different antigen. In some aspects the second immunoglobulin variable domain sequence has binding specificity for an antigen expressed on AML cells, e.g., an antigen other than BCMA. For example, the second immunoglobulin variable domain sequence has binding specificity for CD123. As another example, the second immunoglobulin variable domain sequence has binding specificity for CLL-1. As another example, the second immunoglobulin variable domain sequence has binding specificity for CD34. As another example, the second immunoglobulin variable domain sequence has binding specificity for FLT3. For example, the second immunoglobulin variable domain sequence has binding specificity for folate receptor beta. In some aspects, the second immunoglobulin variable domain sequence has binding specificity for an antigen expressed on B-cells, for example, CD10, CD19, CD20, CD22, CD34, CD123, FLT-3, ROR1, CD79b, CD179b, or CD79a.

### Chimeric TCR

[0493] In one aspect, the anti-BCMA antibodies and antibody fragments of the present invention (for example, those disclosed in Tables 1 and 16) can be grafted to one or more constant domain of a T cell receptor (“TCR”) chain, for example, a TCR alpha or TCR beta chain, to create an chimeric TCR that binds specificity to BCMA. Without being bound by theory, it is believed that chimeric TCRs will signal through the TCR complex upon antigen binding. For example, a BCMA scFv as disclosed herein, can be grafted to the constant domain, e.g., at least a portion of the extracellular constant domain, the transmembrane domain and the cytoplasmic domain, of a TCR chain, for example, the TCR alpha chain and/or the TCR beta chain. As another example, a BCMA antibody fragment, for example a VL domain as described herein, can be grafted to the constant domain of a TCR alpha chain, and a BCMA antibody fragment, for example a VH domain as described herein, can be grafted to the constant domain of a TCR beta chain (or alternatively, a VL domain may be grafted to the constant domain of the TCR beta chain and a VH domain may be grafted to a TCR alpha chain). As another example, the CDRs of an anti-BCMA antibody or antibody fragment, e.g., the CDRs of an anti-BCMA antibody or antibody fragment as described in Tables 20, 21, 22, 23, 24, or 25 may be grafted into a TCR alpha and/or beta chain to create a chimeric TCR that binds specifically to BCMA. For example, the LCDRs disclosed herein may be grafted into the variable domain of a TCR alpha chain and the HCDRs disclosed herein may be grafted to the variable domain of a TCR beta chain, or vice versa. Such chimeric TCRs may be produced by methods known in the art (For example, Willemsen R A et al, Gene Therapy 2000; 7: 1369-1377; Zhang T et al, Cancer Gene Ther 2004; 11: 487-496; Aggen et al, Gene Ther. 2012 April; 19(4):365-74).

### Transmembrane Domain

[0494] With respect to the transmembrane domain, in various embodiments, a CAR can be designed to comprise a transmembrane domain that is attached to the extracellular domain of the CAR. A transmembrane domain can include one or more additional amino acids adjacent to the transmembrane region, e.g., one or more amino acid associated with the extracellular region of the protein from which the transmembrane was derived (e.g., 1, 2, 3, 4, 5, 6, 7, 8, 9, 10 up to 15 amino acids of the extracellular region) and/or one or more additional amino acids associated with the intracellular region of the protein from which the transmembrane protein is derived (e.g., 1, 2, 3, 4, 5, 6, 7, 8, 9, 10 up to 15 amino acids of the intracellular region). In one aspect, the transmembrane domain is one that is associated with one of the other domains of the CAR is used. In some instances, the transmembrane domain can be selected or modified by amino acid substitution to avoid binding of such domains to the transmembrane domains of the same or different surface membrane proteins, e.g., to minimize interactions with other members of the receptor complex. In one aspect, the transmembrane domain is capable of homodimerization with another CAR on the CAR-expressing cell, e.g., CART cell, surface. In a different aspect the amino acid sequence of the transmembrane domain may be modified or substituted so as to minimize interactions with the binding domains of the native binding partner present in the same CAR-expressing cell, e.g., CART.

[0495] The transmembrane domain may be derived either from a natural or from a recombinant source. Where the source is natural, the domain may be derived from any membrane-bound or transmembrane protein. In one aspect the transmembrane domain is capable of signaling to the intracellular domain(s) whenever the CAR has bound to a target. A transmembrane domain of particular use in this invention may include at least the transmembrane region(s) of e.g., the alpha, beta or zeta chain of the T-cell receptor, CD28, CD3 epsilon, CD45, CD4, CD5, CD8 (e.g., CD8 alpha, CD8 beta), CD9, CD16, CD22, CD33, CD37, CD64, CD80, CD86, CD134, CD137, CD154. In some embodiments, a transmembrane domain may include at least the transmembrane region(s) of a costimulatory molecule, e.g., MHC class I molecule, TNF receptor proteins, Immunoglobulin-like proteins, cytokine receptors, integrins, signaling lymphocytic activation molecules (SLAM proteins), activating NK cell receptors, BTLA, a Toll ligand receptor, OX40, CD2, CD7, CD27, CD28, CD30, CD40, CDS, ICAM-1, LFA-1 (CD11a/CD18), 4-1BB (CD137), B7-H3, CDS, ICAM-1, ICOS (CD278), GITR, BAFFR, LIGHT, HVEM (LIGHTR), KIRDS2, SLAMF7, NKp80 (KLRF1), NKp44, NKp30, NKp46, CD19, CD4, CD8alpha, CD8beta, IL2R beta, IL2R gamma, IL7R alpha, ITGA4, VLA1, CD49a, ITGA4, IA4, CD49D, ITGA6, VLA-6, CD49f, ITGAD, CD11d, ITGAE, CD103, ITGAL, CD11a, LFA-1, ITGAM, CD11b, ITGAX, CD11c, ITGB1, CD29, ITGB2, CD18, LFA-1, ITGB7, NKG2D, NKG2C, TNFR2, TRANCE/RANKL, DNAM1 (CD226), SLAMF4 (CD244, 2B4), CD84, CD96 (Tactile), CEACAM1, CRTAM, Ly9 (CD229), CD160 (BY55), PSGL1, CD100 (SEMA4D), CD69, SLAMF6 (NTB-A, Ly108), SLAM (SLAMF1, CD150, IPO-3), BLAME (SLAMF8), SELPLG (CD162), LTBR, LAT, GADS, SLP-76, PAG/Cbp, CD19a, and a ligand that specifically binds with CD83.

[0496] In some instances, the transmembrane domain can be attached to the extracellular region of the CAR, e.g., the antigen binding domain of the CAR, via a hinge, e.g., a hinge from a human protein. For example, in one embodiment, the hinge can be a human Ig (immunoglobulin) hinge, e.g., an IgG4 hinge, or a CD8a hinge. In one embodiment, the hinge or spacer comprises (e.g., consists of) the amino acid sequence of SEQ ID NO:2. In one aspect, the transmembrane domain comprises (e.g., consists of) a transmembrane domain of SEQ ID NO: 6.

[0497] In one aspect, the hinge or spacer comprises an IgG4 hinge. For example, in one embodiment, the hinge or spacer comprises a hinge of the amino acid sequence ESKYGPPCPPCPAPEFLGGPSVFLFPPKPKDTLMISRTPEVTCVVVDVSQEDPEVQFNWYVDGV EVHNAKTKPREEQFNSTYRVVSVLTVLHQDWLNGKEYKCKVSNKGLPSSIEKTISKAKGQPRE PQVYTLPPSQEEMTKNQVSLTCLVKGFYPSDIAVEWESNGQPENNYKTTPPVLDSDGSFFLYSR LTVDKSRWQEGNVFSCSVMHEALHNHYTQKSLSLSLGKM (SEQ ID NO:3). In some embodiments, the hinge or spacer comprises a hinge encoded by a nucleotide sequence of

(SEQ ID NO: 14)

GAGAGCAAGTACGGCCCTCCCTGCCCCCCTTGCCCTGCCCCCGAGTTCCT
GGGCGGACCCAGCGTGTTCCTGTTCCCCCCCAAGCCCAAGGACACCCTGA
TGATCAGCCGGACCCCCGAGGTGACCTGTGTGGTGGTGGACGTGTCCCAG
GAGGACCCCGAGGTCCAGTTCAACTGGTACGTGGACGGCGTGGAGGTGCA
CAACGCCAAGACCAAGCCCCGGGAGGAGCAGTTCAATAGCACCTACCGGG
TGGTGTCCGTGCTGACCGTGCTGCACCAGGACTGGCTGAACGGCAAGGAA
TACAAGTGTAAGGTGTCCAACAAGGGCCTGCCCAGCAGCATCGAGAAAAC
CATCAGCAAGGCCAAGGGCCAGCCTCGGGAGCCCCAGGTGTACACCCTGC
CCCCTAGCCAAGAGGAGATGACCAAGAACCAGGTGTCCCTGACCTGCCTG
GTGAAGGGCTTCTACCCCAGCGACATCGCCGTGGAGTGGGAGAGCAACGG
CCAGCCCGAGAACAACTACAAGACCACCCCCCCTGTGCTGGACAGCGACG
GCAGCTTCTTCCTGTACAGCCGGCTGACCGTGGACAAGAGCCGGTGGCAG
GAGGGCAACGTCTTTAGCTGCTCCGTGATGCACGAGGCCCTGCACAACCA
CTACACCCAGAAGAGCCTGAGCCTGTCCCTGGGCAAGATG.

[0498] In one aspect, the hinge or spacer comprises an IgD hinge. For example, in one embodiment, the hinge or spacer comprises a hinge of the amino acid sequence RWPESPKAQASSVPTAQPQAEGSLAKATTAPATTRNTGRGGEEKKKEKEKEEQEERETKTPEC PSHTQPLGVYLLTPAVQDLWLRDKATFTCFVVGSDLKDAHLTWEVAGKVPTGGVEEGLLERH SNGSQSQHSRLTLPRSLWNAGTSVTCTLNHPSLPPQRLMALREPAAQAPVKLSLNLLASSDPPE AASWLLCEVSGFSPPNILLMWLEDQREVNTSGFAPARPPPQPGSTTFWAWSVLRVPAPPSPQPA TYTCVVSHEDSRTLLNASRSLEVSYVTDH (SEQ ID NO:4). In some embodiments, the hinge or spacer comprises a hinge encoded by a nucleotide sequence of

(SEQ ID NO: 15)

AGGTGGCCCGAAAGTCCCAAGGCCCAGGCATCTAGTGTTCCTACTGCACA
GCCCCAGGCAGAAGGCAGCCTAGCCAAAGCTACTACTGCACCTGCCACTA
CGCGCAATACTGGCCGTGGCGGGGAGGAGAAGAAAAAGGAGAAAGAGAAA
GAAGAACAGGAAGAGAGGGAGACCAAGACCCCTGAATGTCCATCCCATAC
CCAGCCGCTGGGCGTCTATCTCTTGACTCCCGCAGTACAGGACTTGTGGC
TTAGAGATAAGGCCACCTTTACATGTTTCGTCGTGGGCTCTGACCTGAAG
GATGCCCATTTGACTTGGGAGGTTGCCGGAAAGGTACCCACAGGGGGGGT
TGAGGAAGGGTTGCTGGAGCGCCATTCCAATGGCTCTCAGAGCCAGCACT
CAAGACTCACCCTTCCGAGATCCCTGTGGAACGCCGGGACCTCTGTCACA
TGTACTCTAAATCATCCTAGCCTGCCCCCACAGCGTCTGATGGCCCTTAG
AGAGCCAGCCGCCCAGGCACCAGTTAAGCTTAGCCTGAATCTGCTCGCCA
GTAGTGATCCCCCAGAGGCCGCCAGCTGGCTCTTATGCGAAGTGTCCGGC
TTTAGCCCGCCCAACATCTTGCTCATGTGGCTGGAGGACCAGCGAGAAGT
GAACACCAGCGGCTTCGCTCCAGCCCGGCCCCCACCCCAGCCGGGTTCTA
CCACATTCTGGGCCTGGAGTGTCTTAAGGGTCCCAGCACCACCTAGCCCC
CAGCCAGCCACATACACCTGTGTTGTGTCCCATGAAGATAGCAGGACCCT
GCTAAATGCTTCTAGGAGTCTGGAGGTTTCCTACGTGACTGACCATT.

[0499] In one aspect, the transmembrane domain may be recombinant, in which case it will comprise predominantly hydrophobic residues such as leucine and valine. In one aspect a triplet of phenylalanine, tryptophan and valine can be found at each end of a recombinant transmembrane domain.

[0500] Optionally, a short oligo- or polypeptide linker, between 2 and 10 amino acids in length may form the linkage between the transmembrane domain and the cytoplasmic region of the CAR. A glycine-serine doublet provides a particularly suitable linker. For example, in one aspect, the linker comprises the amino acid sequence of GGGGSGGGGS (SEQ ID NO:5). In some embodiments, the linker is encoded by a nucleotide sequence of GGTGGCGGAGGTTCTGGAGGTGGAGGTTCC (SEQ ID NO:16).

[0501] In one aspect, the hinge or spacer comprises a KIR2DS2 hinge.

### Cytoplasmic Domain

[0502] The cytoplasmic domain or region of a CAR of the present invention includes an intracellular signaling domain. An intracellular signaling domain is generally responsible for activation of at least one of the normal effector functions of the immune cell in which the CAR has been introduced.

[0503] Examples of intracellular signaling domains for use in the CAR of the invention include the cytoplasmic sequences of the T cell receptor (TCR) and co-receptors that act in concert to initiate signal transduction following antigen receptor engagement, as well as any derivative or variant of these sequences and any recombinant sequence that has the same functional capability.

[0504] It is known that signals generated through the TCR alone are insufficient for full activation of the T cell and that a secondary and/or costimulatory signal is also required. Thus, T cell activation can be said to be mediated by two distinct classes of cytoplasmic signaling sequences: those that initiate antigen-dependent primary activation through the TCR (primary intracellular signaling domains) and those that act in an antigen-independent manner to provide a secondary or costimulatory signal (secondary cytoplasmic domain, e.g., a costimulatory domain).

[0505] A primary signaling domain regulates primary activation of the TCR complex either in a stimulatory way, or in an inhibitory way. Primary intracellular signaling domains that act in a stimulatory manner may contain signaling motifs which are known as immunoreceptor tyrosine-based activation motifs or ITAMs.

[0506] Examples of ITAM containing primary intracellular signaling domains that are of particular use in the invention include those of TCR zeta, FcR gamma, FcR beta, CD3 gamma, CD3 delta, CD3 epsilon, CD5, CD22, CD79a, CD79b, CD278 (also known as “ICOS”), FcεRI, DAP10, DAP12, and CD66d. In one embodiment, a CAR of the invention comprises an intracellular signaling domain, e.g., a primary signaling domain of CD3-zeta.

[0507] In one embodiment, a primary signaling domain comprises a modified ITAM domain, e.g., a mutated ITAM domain which has altered (e.g., increased or decreased) activity as compared to the native ITAM domain. In one embodiment, a primary signaling domain comprises a modified ITAM-containing primary intracellular signaling domain, e.g., an optimized and/or truncated ITAM-containing primary intracellular signaling domain. In an embodiment, a primary signaling domain comprises one, two, three, four or more ITAM motifs.

[0508] Further examples of molecules containing a primary intracellular signaling domain that are of particular use in the invention include those of DAP10, DAP12, and CD32.

[0509] The intracellular signalling domain of the CAR can comprise the primary signalling domain, e.g., CD3-zeta signaling domain, by itself or it can be combined with any other desired intracellular signaling domain(s) useful in the context of a CAR of the invention. For example, the intracellular signaling domain of the CAR can comprise a primary signalling domain, e.g., CD3 zeta chain portion, and a costimulatory signaling domain. The costimulatory signaling domain refers to a portion of the CAR comprising the intracellular domain of a costimulatory molecule. A costimulatory molecule is a cell surface molecule other than an antigen receptor or its ligands that is required for an efficient response of lymphocytes to an antigen. Examples of such molecules include MHC class I molecule, TNF receptor proteins, Immunoglobulin-like proteins, cytokine receptors, integrins, signaling lymphocytic activation molecules (SLAM proteins), activating NK cell receptors, BTLA, a Toll ligand receptor, OX40, CD2, CD7, CD27, CD28, CD30, CD40, CDS, ICAM-1, LFA-1 (CD11a/CD18), 4-1BB (CD137), B7-H3, CDS, ICAM-1, ICOS (CD278), GITR, BAFFR, LIGHT, HVEM (LIGHTR), KIRDS2, SLAMF7, NKp80 (KLRF1), NKp44, NKp30, NKp46, CD19, CD4, CD8alpha, CD8beta, IL2R beta, IL2R gamma, IL7R alpha, ITGA4, VLA1, CD49a, ITGA4, IA4, CD49D, ITGA6, VLA-6, CD49f, ITGAD, CD11d, ITGAE, CD103, ITGAL, CD11a, LFA-1, ITGAM, CD11b, ITGAX, CD11c, ITGB1, CD29, ITGB2, CD18, LFA-1, ITGB7, NKG2D, NKG2C, TNFR2, TRANCE/RANKL, DNAM1 (CD226), SLAMF4 (CD244, 2B4), CD84, CD96 (Tactile), CEACAM1, CRTAM, Ly9 (CD229), CD160 (BY55), PSGL1, CD100 (SEMA4D), CD69, SLAMF6 (NTB-A, Ly108), SLAM (SLAMF1, CD150, IPO-3), BLAME (SLAMF8), SELPLG (CD162), LTBR, LAT, GADS, SLP-76, PAG/Cbp, CD19a, and a ligand that specifically binds with CD83, and the like. For example, CD27 costimulation has been demonstrated to enhance expansion, effector function, and survival of human CART cells in vitro and augments human T cell persistence and antitumor activity in vivo (Song et al. Blood. 2012; 119(3):696-706). The intracellular signaling sequences within the cytoplasmic portion of the CAR of the invention may be linked to each other in a random or specified order. Optionally, a short oligo- or polypeptide linker, for example, between 2 and 10 amino acids (e.g., 2, 3, 4, 5, 6, 7, 8, 9, or 10 amino acids) in length may form the linkage between intracellular signaling sequence. In one embodiment, a glycine-serine doublet can be used as a suitable linker. In one embodiment, a single amino acid, e.g., an alanine, a glycine, can be used as a suitable linker.

[0510] In one aspect, the intracellular signaling domain is designed to comprise two or more, e.g., 2, 3, 4, 5, or more, costimulatory signaling domains. In an embodiment, the two or more, e.g., 2, 3, 4, 5, or more, costimulatory signaling domains, are separated by a linker molecule, e.g., a linker molecule described herein. In one embodiment, the intracellular signaling domain comprises two costimulatory signaling domains. In some embodiments, the linker molecule is a glycine residue. In some embodiments, the linker is an alanine residue.

[0511] In one aspect, the intracellular signaling domain is designed to comprise the signaling domain of CD3-zeta and the signaling domain of CD28. In one aspect, the intracellular signaling domain is designed to comprise the signaling domain of CD3-zeta and the signaling domain of 4-1BB. In one aspect, the signaling domain of 4-1BB is a signaling domain of SEQ ID NO: 7. In one aspect, the signaling domain of CD3-zeta is a signaling domain of SEQ ID NO: 9 (mutant CD3zeta) or SEQ ID NO: 10 (wild type human CD3zeta).

[0512] In one aspect, the intracellular signaling domain is designed to comprise the signaling domain of CD3-zeta and the signaling domain of CD27. In one aspect, the signaling domain of CD27 comprises an amino acid sequence of QRRKYRSNKGESPVEPAEPCRYSCPREEEGSTIPIQEDYRKPEPACSP (SEQ ID NO:8). In one aspect, the signalling domain of CD27 is encoded by a nucleic acid sequence of

(SEQ ID NO: 19)

AGGAGTAAGAGGAGCAGGCTCCTGCACAGTGACTACATGAACATGACTCC
CCGCCGCCCCGGGCCCACCCGCAAGCATTACCAGCCCTATGCCCCACCAC
GCGACTTCGCAGCCTATCGCTCC.

[0513] In one aspect, the intracellular is designed to comprise the signaling domain of CD3-zeta and the signaling domain of CD28. In one aspect, the signaling domain of CD28 comprises an amino acid sequence of SEQ ID NO: 1104. In one aspect, the signaling domain of CD28 is encoded by a nucleic acid sequence of SEQ ID NO: 1105.

[0514] In one aspect, the intracellular is designed to comprise the signaling domain of CD3-zeta and the signaling domain of ICOS. In one aspect, the signaling domain of ICOS comprises an amino acid sequence of SEQ ID NO: 1106. In one aspect, the signaling domain of ICOS is encoded by a nucleic acid sequence of SEQ ID NO: 1107.

[0515] In one aspect, the CAR-expressing cell described herein can further comprise a second CAR, e.g., a second CAR that includes a different antigen binding domain, e.g., to the same target (BCMA) or a different target (e.g., CD19, CD20, or CS-1, or other multiple myeloma targets, e.g., kappa light chain, CD138, Lewis Y antigen, or CD38 (Garfall et al., Discovery Medicine, 2014, 17(91):37-46)). In one embodiment, the CAR-expressing cell comprises a first CAR that targets a first antigen and includes an intracellular signaling domain having a costimulatory signaling domain but not a primary signaling domain, and a second CAR that targets a second, different, antigen and includes an intracellular signaling domain having a primary signaling domain but not a costimulatory signaling domain. While not wishing to be bound by theory, placement of a costimulatory signaling domain, e.g., 4-1BB, CD28, CD27 ICOS, or OX-40, onto the first CAR, and the primary signaling domain, e.g., CD3 zeta, on the second CAR can limit the CAR activity to cells where both targets are expressed. In one embodiment, the CAR expressing cell comprises a first BCMA CAR that includes a BCMA binding domain, a transmembrane domain and a costimulatory domain and a second CAR that targets an antigen other than BCMA (e.g., an antigen expressed on leukemia or lymphoma cells, e.g., CD19, CD20, CS-1, kappa light chain, CD139, Lewis Y antigen, or CD38) and includes an antigen binding domain, a transmembrane domain and a primary signaling domain. In another embodiment, the CAR expressing cell comprises a first BCMA CAR that includes a BCMA binding domain, a transmembrane domain and a primary signaling domain and a second CAR that targets an antigen other than BCMA (e.g., an antigen expressed on leukemia or lymphoma cells, e.g., CD19, CD20, CS-1, kappa light chain, CD139, Lewis Y antigen, or CD38) and includes an antigen binding domain to the antigen, a transmembrane domain and a costimulatory signaling domain. In one embodiment, the CAR-expressing cell comprises a BCMA CAR described herein and a CAR that targets CD19 (CD19 CAR).

[0516] In one embodiment, the CAR-expressing cell comprises a BCMA CAR described herein and an inhibitory CAR. In one embodiment, the inhibitory CAR comprises an antigen binding domain that binds an antigen found on normal cells but not cancer cells, e.g., normal cells that also express mesothelin. In one embodiment, the inhibitory CAR comprises the antigen binding domain, a transmembrane domain and an intracellular domain of an inhibitory molecule. For example, the intracellular domain of the inhibitory CAR can be an intracellular domain of PD1, PD-L1, PD-L2, CTLA4, TIM3, CEACAM (e.g., CEACAM-1, CEACAM-3 and/or CEACAM-5), LAG3, VISTA, BTLA, TIGIT, LAIR1, CD160, 2B4, CD80, CD86, B7-H3 (CD276), B7-H4 (VTCN1), HVEM (TNFRSF14 or CD270), KIR, A2aR, MHC class I, MHC class II, GALS, adenosine, and TGFR beta.

[0517] In one embodiment, when the CAR-expressing cell comprises two or more different CARs, the antigen binding domains of the different CARs can be such that the antigen binding domains do not interact with one another. For example, a cell expressing a first and second CAR can have an antigen binding domain of the first CAR, e.g., as a fragment, e.g., an scFv, that does not form an association with the antigen binding domain of the second CAR, e.g., the antigen binding domain of the second CAR is a VHH.

[0518] In some embodiments, the antigen binding domain comprises a single domain antigen binding (SDAB) molecules include molecules whose complementary determining regions are part of a single domain polypeptide. Examples include, but are not limited to, heavy chain variable domains, binding molecules naturally devoid of light chains, single domains derived from conventional 4-chain antibodies, engineered domains and single domain scaffolds other than those derived from antibodies. SDAB molecules may be any of the art, or any future single domain molecules. SDAB molecules may be derived from any species including, but not limited to mouse, human, camel, llama, lamprey, fish, shark, goat, rabbit, and bovine. This term also includes naturally occurring single domain antibody molecules from species other than Camelidae and sharks.

[0519] In one aspect, an SDAB molecule can be derived from a variable region of the immunoglobulin found in fish, such as, for example, that which is derived from the immunoglobulin isotype known as Novel Antigen Receptor (NAR) found in the serum of shark. Methods of producing single domain molecules derived from a variable region of NAR (“IgNARs”) are described in WO 03/014161 and Streltsov (2005) Protein Sci. 14:2901-2909.

[0520] According to another aspect, an SDAB molecule is a naturally occurring single domain antigen binding molecule known as heavy chain devoid of light chains. Such single domain molecules are disclosed in WO 9404678 and Hamers-Casterman, C. et al. (1993) Nature 363:446-448, for example. For clarity reasons, this variable domain derived from a heavy chain molecule naturally devoid of light chain is known herein as a VHH or nanobody to distinguish it from the conventional VH of four chain immunoglobulins. Such a VHH molecule can be derived from Camelidae species, for example in camel, llama, dromedary, alpaca and guanaco. Other species besides Camelidae may produce heavy chain molecules naturally devoid of light chain; such VHHs are within the scope of the invention.

[0521] The SDAB molecules can be recombinant, CDR-grafted, humanized, camelized, de-immunized and/or in vitro generated (e.g., selected by phage display).

[0522] It has also been discovered, that cells having a plurality of chimeric membrane embedded receptors comprising an antigen binding domain that interactions between the antigen binding domain of the receptors can be undesirable, e.g., because it inhibits the ability of one or more of the antigen binding domains to bind its cognate antigen. Accordingly, disclosed herein are cells having a first and a second non-naturally occurring chimeric membrane embedded receptor comprising antigen binding domains that minimize such interactions. Also disclosed herein are nucleic acids encoding a first and a second non-naturally occurring chimeric membrane embedded receptor comprising a antigen binding domains that minimize such interactions, as well as methods of making and using such cells and nucleic acids. In an embodiment the antigen binding domain of one of said first said second non-naturally occurring chimeric membrane embedded receptor, comprises an scFv, and the other comprises a single VH domain, e.g., a camelid, shark, or lamprey single VH domain, or a single VH domain derived from a human or mouse sequence.

[0523] In some embodiments, the claimed invention comprises a first and second CAR, wherein the antigen binding domain of one of said first CAR said second CAR does not comprise a variable light domain and a variable heavy domain. In some embodiments, the antigen binding domain of one of said first CAR said second CAR is an scFv, and the other is not an scFv. In some embodiments, the antigen binding domain of one of said first CAR said second CAR comprises a single VH domain, e.g., a camelid, shark, or lamprey single VH domain, or a single VH domain derived from a human or mouse sequence. In some embodiments, the antigen binding domain of one of said first CAR said second CAR comprises a nanobody. In some embodiments, the antigen binding domain of one of said first CAR said second CAR comprises a camelid VHH domain.

[0524] In some embodiments, the antigen binding domain of one of said first CAR said second CAR comprises an scFv, and the other comprises a single VH domain, e.g., a camelid, shark, or lamprey single VH domain, or a single VH domain derived from a human or mouse sequence. In some embodiments, the antigen binding domain of one of said first CAR said second CAR comprises an scFv, and the other comprises a nanobody. In some embodiments, the antigen binding domain of one of said first CAR said second CAR comprises comprises an scFv, and the other comprises a camelid VHH domain.

[0525] In some embodiments, when present on the surface of a cell, binding of the antigen binding domain of said first CAR to its cognate antigen is not substantially reduced by the presence of said second CAR. In some embodiments, binding of the antigen binding domain of said first CAR to its cognate antigen in the presence of said second CAR is 85%, 90%, 95%, 96%, 97%, 98% or 99% of binding of the antigen binding domain of said first CAR to its cognate antigen in the absence of said second CAR.

[0526] In some embodiments, when present on the surface of a cell, the antigen binding domains of said first CAR said second CAR, associate with one another less than if both were scFv antigen binding domains. In some embodiments, the antigen binding domains of said first CAR said second CAR, associate with one another 85%, 90%, 95%, 96%, 97%, 98% or 99% less than if both were scFv antigen binding domains.

[0527] In another aspect, the CAR-expressing cell described herein can further express another agent, e.g., an agent which enhances the activity of a CAR-expressing cell. For example, in one embodiment, the agent can be an agent which inhibits an inhibitory molecule, e.g., an agent described herein. Inhibitory molecules, e.g., PD1, can, in some embodiments, decrease the ability of a CAR-expressing cell to mount an immune effector response. Examples of inhibitory molecules include PD1, PD-L1, PD-L2, CTLA4, TIM3, CEACAM (e.g., CEACAM-1, CEACAM-3 and/or CEACAM-5), LAG3, VISTA, BTLA, TIGIT, LAIR1, CD160, 2B4, CD80, CD86, B7-H3 (CD276), B7-H4 (VTCN1), HVEM (TNFRSF14 or CD270), KIR, A2aR, MHC class I, MHC class II, GAL9, adenosine, and TGFR beta. In one embodiment, the agent which inhibits an inhibitory molecule comprises a first polypeptide, e.g., an inhibitory molecule, associated with a second polypeptide that provides a positive signal to the cell, e.g., an intracellular signaling domain described herein. In one embodiment, the agent comprises a first polypeptide, e.g., of an inhibitory molecule such as PD1, PD-L1, PD-L2, CTLA4, TIM3, CEACAM (e.g., CEACAM-1, CEACAM-3 and/or CEACAM-5), LAG3, VISTA, BTLA, TIGIT, LAIR1, CD160, 2B4, CD80, CD86, B7-H3 (CD276), B7-H4 (VTCN1), HVEM (TNFRSF14 or CD270), KIR, A2aR, MHC class I, MHC class II, GAL9, adenosine, and TGFR beta, or a fragment of any of these (e.g., at least a portion of an extracellular domain of any of these), and a second polypeptide which is an intracellular signaling domain described herein (e.g., comprising a costimulatory domain (e.g., 41BB, CD27 ICOS, or CD28, e.g., as described herein) and/or a primary signaling domain (e.g., a CD3 zeta signaling domain described herein). In one embodiment, the agent comprises a first polypeptide of PD1 or a fragment thereof (e.g., at least a portion of an extracellular domain of PD1), and a second polypeptide of an intracellular signaling domain described herein (e.g., a CD28 signaling domain described herein and/or a CD3 zeta signaling domain described herein). In embodiments, the CAR-expressing cell described herein comprises a switch costimulatory receptor, e.g., as described in WO 2013/019615, which is incorporated herein by reference in its entirety. PD1 is an inhibitory member of the CD28 family of receptors that also includes CD28, CTLA-4, ICOS, and BTLA. PD-1 is expressed on activated B cells, T cells and myeloid cells (Agata et al. 1996 Int. Immunol 8:765-75). Two ligands for PD1, PD-L1 and PD-L2 have been shown to downregulate T cell activation upon binding to PD1 (Freeman et a. 2000 J Exp Med 192:1027-34; Latchman et al. 2001 Nat Immunol 2:261-8; Carter et al. 2002 Eur J Immunol 32:634-43). PD-L1 is abundant in human cancers (Dong et al. 2003 J Mol Med 81:281-7; Blank et al. 2005 Cancer Immunol. Immunother 54:307-314; Konishi et al. 2004 Clin Cancer Res 10:5094) Immune suppression can be reversed by inhibiting the local interaction of PD1 with PD-L1.

[0528] In one embodiment, the agent comprises the extracellular domain (ECD) of an inhibitory molecule, e.g., Programmed Death 1 (PD1), can be fused to a transmembrane domain and intracellular signaling domains such as 41BB and CD3 zeta (also referred to herein as a PD1 CAR). In one embodiment, the PD1 CAR, when used incombinations with a BCMA CAR described herein, improves the persistence of the CAR-expressing cell, e.g., T cell or NK cell. In one embodiment, the CAR is a PD1 CAR comprising the extracellular domain of PD1 indicated as underlined in SEQ ID NO: 24. In one embodiment, the PD1 CAR comprises the amino acid sequence of SEQ ID NO:24.

(SEQ ID NO: 24)

Malpvtalllplalllhaarppgwfldspdrpwnpptfspallvvtegdn
atftcsfsntsesfylnwyrmspsnqtdklaafpedrsqpgqdcrfrvtq
lpngrdfhmsvvrarrndsgtylcgaislapkaqikeslraelryterra
evptahpspsprpagqfqtlvtttpaprpptpaptiasqplslrpeacrp
aaggavhtrgldfacdiyiwaplagtcgvlllslvitlyckrgrkkllyi
fkqpfmrpvqttqeedgcscrfpeeeeggcelrvkfsrsadapaykqgqn
qlynelnlgrreeydvldkrrgrdpemggkprrknpqeglynelqkdkma
eayseigmkgerrrgkghdglyqglstatkdtydalhmqalppr.

[0529] In one embodiment, the PD1 CAR comprises the amino acid sequence provided below (SEQ ID NO:22).

(SEQ ID NO: 22)

pgwfldspdrpwnpptfspallvvtegdnatftcsfsntsesfvlnwyrm
spsnqtdklaafpedrsqpgqdcrfrvtqlpngrdfhmsvvrarrndsgt
ylcgaislapkaqikeslraelrvterraevptahpspsprpagqfqtlv
tttpaprpptpaptiasqplslrpeacrpaaggavhtrgldfacdiyiwa
plagtcgvlllslvitlyckrgrkkllyifkqpfmrpvqttqeedgcscr
fpeeeeggcelrvkfsrsadapaykqgqnqlynelnlgrreeydvldkrr
grdpemggkprrknpqeglynelqkdkmaeayseigmkgerrrgkghdgl
yqglstatkdtydalhmqalppr.

[0530] In one embodiment, the agent comprises a nucleic acid sequence encoding the PD1 CAR, e.g., the PD1 CAR described herein. In one embodiment, the nucleic acid sequence for the PD1 CAR is shown below, with the PD1 ECD underlined below in SEQ ID NO: 23

(SEQ ID NO: 23)

atggccctccctgtcactgccctgcttctccccctcgcactcctgctcca
cgccgctagaccacccggatggtttctggactctccggatcgcccgtgga
atcccccaaccttctcaccggcactcttggttgtgactgagggcgataat
gcgaccttcacgtgctcgttctccaacacctccgaatcattcgtgctgaa
ctggtaccgcatgagcccgtcaaaccagaccgacaagctcgccgcgtttc
cggaagatcggtcgcaaccgggacaggattgtcggttccgcgtgactcaa
ctgccgaatggcagagacttccacatgagcgtggtccgcgctaggcgaaa
cgactccgggacctacctgtgcggagccatctcgctggcgcctaaggccc
aaatcaaagagagcttgagggccgaactgagagtgaccgagcgcagagct
gaggtgccaactgcacatccatccccatcgcctcggcctgcggggcagtt
tcagaccctggtcacgaccactccggcgccgcgcccaccgactccggccc
caactatcgcgagccagcccctgtcgctgaggccggaagcatgccgccct
gccgccggaggtgctgtgcatacccggggattggacttcgcatgcgacat
ctacatttgggctcctctcgccggaacttgtggcgtgctccttctgtccc
tggtcatcaccctgtactgcaagcggggtcggaaaaagcttctgtacatt
ttcaagcagcccttcatgaggcccgtgcaaaccacccaggaggaggacgg
ttgctcctgccggttccccgaagaggaagaaggaggttgcgagctgcgcg
tgaagttctcccggagcgccgacgcccccgcctataagcagggccagaac
cagctgtacaacgaactgaacctgggacggcgggaagagtacgatgtgct
ggacaagcggcgcggccgggaccccgaaatgggcgggaagcctagaagaa
agaaccctcaggaaggcctgtataacgagctgcagaaggacaagatggcc
gaggcctactccgaaattgggatgaagggagagcggcggaggggaaaggg
gcacgacggcctgtaccaaggactgtccaccgccaccaaggacacatacg
atgccctgcacatgcaggcccttccccctcgc.

[0531] In another aspect, the present invention provides a population of CAR-expressing cells, e.g., CART cells or CAR-expressing NK cells. In some embodiments, the population of CAR-expressing cells comprises a mixture of cells expressing different CARs. For example, in one embodiment, the population of CAR-expressing cells (e.g., CART cells or CAR-expressing NK cells) can include a first cell expressing a CAR having an anti-BCMA binding domain described herein, and a second cell expressing a CAR having a different anti-BCMA binding domain, e.g., an anti-BCMA binding domain described herein that differs from the anti-BCMA binding domain in the CAR expressed by the first cell. As another example, the population of CAR-expressing cells can include a first cell expressing a CAR that includes an anti-BCMA binding domain, e.g., as described herein, and a second cell expressing a CAR that includes an antigen binding domain to a target other than BCMA (e.g., CD19, CD20, CS-1, kappa light chain, CD139, Lewis Y antigen, or CD38). In one embodiment, the population of CAR-expressing cells includes a first cell expressing a CAR comprising an anti-BCMA binding domain, e.g., as described herein, and a second cell expressing a CAR comprising an antigen binding domain that targets CD19 (CD19 CAR). In one embodiment, the population of CAR-expressing cells includes, e.g., a first cell expressing a CAR that includes a primary intracellular signaling domain, and a second cell expressing a CAR that includes a secondary signaling domain.

[0532] In another aspect, the present invention provides a population of cells wherein at least one cell in the population expresses a CAR having an anti-BCMA domain described herein, and a second cell expressing another agent, e.g., an agent which enhances the activity of a CAR-expressing cell. For example, in one embodiment, the agent can be an agent which inhibits an inhibitory molecule. Inhibitory molecules, e.g., can, in some embodiments, decrease the ability of a CAR-expressing cell to mount an immune effector response. Examples of inhibitory molecules include PD1, PD-L1, PD-L2, CTLA4, TIM3, CEACAM (e.g., CEACAM-1, CEACAM-3 and/or CEACAM-5), LAG3, VISTA, BTLA, TIGIT, LAIR1, CD160, 2B4, CD80, CD86, B7-H3 (CD276), B7-H4 (VTCN1), HVEM (TNFRSF14 or CD270), KIR, A2aR, MHC class I, MHC class II, GAL9, adenosine, and TGFR beta. In one embodiment, the agent which inhibits an inhibitory molecule comprises a first polypeptide, e.g., an inhibitory molecule, associated with a second polypeptide that provides a positive signal to the cell, e.g., an intracellular signaling domain described herein. In one embodiment, the agent comprises a first polypeptide, e.g., of an inhibitory molecule such as PD1, PD-L1, PD-L2, CTLA4, TIM3, CEACAM (e.g., CEACAM-1, CEACAM-3 and/or CEACAM-5), LAG3, VISTA, BTLA, TIGIT, LAIR1, CD160, 2B4, CD80, CD86, B7-H3 (CD276), B7-H4 (VTCN1), HVEM (TNFRSF14 or CD270), KIR, A2aR, MHC class I, MHC class II, GAL9, adenosine, and TGFR beta, or a fragment of any of these (e.g., at least a portion of an extracellular domain of any of these), and a second polypeptide which is an intracellular signaling domain described herein (e.g., comprising a costimulatory domain (e.g., 41BB, CD27, ICOS, or CD28, e.g., as described herein) and/or a primary signaling domain (e.g., a CD3 zeta signaling domain described herein). In one embodiment, the agent comprises a first polypeptide of PD1 or a fragment thereof (e.g., at least a portion of the extracellular domain of PD1), and a second polypeptide of an intracellular signaling domain described herein (e.g., a CD28 signaling domain described herein and/or a CD3 zeta signaling domain described herein).

[0533] In one aspect, the present invention provides methods comprising administering a population of CAR-expressing cells (e.g., CART cells or CAR-expressing NK cells), e.g., a mixture of cells expressing different CARs, in combination with another agent, e.g., a kinase inhibitor, such as a kinase inhibitor described herein. In another aspect, the present invention provides methods comprising administering a population of cells wherein at least one cell in the population expresses a CAR having an anti-cancer associated antigen binding domain as described herein, and a second cell expressing another agent, e.g., an agent which enhances the activity of a CAR-expressing cell, in combination with another agent, e.g., a kinase inhibitor, such as a kinase inhibitor described herein.

### Natural Killer Cell Receptor (NKR) CARs

[0534] In an embodiment, the CAR molecule described herein comprises one or more components of a natural killer cell receptor (NKR), thereby forming an NKR-CAR. The NKR component can be a transmembrane domain, a hinge domain, or a cytoplasmic domain from any of the following natural killer cell receptors: killer cell immunoglobulin-like receptor (KIR), e.g., KIR2DL1, KIR2DL2/L3, KIR2DL4, KIR2DL5A, KIR2DL5B, KIR2DS1, KIR2DS2, KIR2DS3, KIR2DS4, DIR2DS5, KIR3DL1/S1, KIR3DL2, KIR3DL3, KIR2DP1, and KIR3DP1; natural cyotoxicity receptor (NCR), e.g., NKp30, NKp44, NKp46; signaling lymphocyte activation molecule (SLAM) family of immune cell receptors, e.g., CD48, CD229, 2B4, CD84, NTB-A, CRACC, BLAME, and CD2F-10; Fc receptor (FcR), e.g., CD16, and CD64; and Ly49 receptors, e.g., LY49A, LY49C. The NKR-CAR molecules described herein may interact with an adaptor molecule or intracellular signaling domain, e.g., DAP12. Exemplary configurations and sequences of CAR molecules comprising NKR components are described in International Publication No. WO2014/145252, the contents of which are hereby incorporated by reference.

### Strategies for Regulating Chimeric Antigen Receptors

[0535] There are many ways CAR activities can be regulated. In some embodiments, a regulatable CAR (RCAR) where the CAR activity can be controlled is desirable to optimize the safety and efficacy of a CAR therapy. For example, inducing apoptosis using, e.g., a caspase fused to a dimerization domain (see, e.g., Di et al., N Engl. J. Med. 2011 Nov. 3; 365(18):1673-1683), can be used as a safety switch in the CAR therapy of the instant invention. In another example, CAR-expressing cells can also express an inducible Caspase-9 (iCaspase-9) molecule that, upon administration of a dimerizer drug (e.g., rimiducid (also called AP1903 (Bellicum Pharmaceuticals) or AP20187 (Ariad)) leads to activation of the Caspase-9 and apoptosis of the cells. The iCaspase-9 molecule contains a chemical inducer of dimerization (CID) binding domain that mediates dimerization in the presence of a CID. This results in inducible and selective depletion of CAR-expressing cells. In some cases, the iCaspase-9 molecule is encoded by a nucleic acid molecule separate from the CAR-encoding vector(s). In some cases, the iCaspase-9 molecule is encoded by the same nucleic acid molecule as the CAR-encoding vector. The iCaspase-9 can provide a safety switch to avoid any toxicity of CAR-expressing cells. See, e.g., Song et al. Cancer Gene Ther. 2008; 15(10):667-75; Clinical Trial Id. No. NCT02107963; and Di Stasi et al. N. Engl. J. Med. 2011; 365:1673-83.

[0536] Alternative strategies for regulating the CAR therapy of the instant invention include utilizing small molecules or antibodies that deactivate or turn off CAR activity, e.g., by deleting CAR-expressing cells, e.g., by inducing antibody dependent cell-mediated cytotoxicity (ADCC). For example, CAR-expressing cells described herein may also express an antigen that is recognized by molecules capable of inducing cell death, e.g., ADCC or compliment-induced cell death. For example, CAR expressing cells described herein may also express a receptor capable of being targeted by an antibody or antibody fragment. Examples of such receptors include EpCAM, VEGFR, integrins (e.g., integrins αvβ3, α4, aI¾β3, α4β7, a5β1, αvβ3, αv), members of the TNF receptor superfamily (e.g., TRAIL-R1, TRAIL-R2), PDGF Receptor, interferon receptor, folate receptor, GPNMB, ICAM-1, HLA-DR, CEA, CA-125, MUC1, TAG-72, IL-6 receptor, 5T4, GD2, GD3, CD2, CD3, CD4, CD5, CD1 1, CD1 1a/LFA-1, CD15, CD18/ITGB2, CD19, CD20, CD22, CD23/lgE Receptor, CD25, CD28, CD30, CD33, CD38, CD40, CD41, CD44, CD51, CD52, CD62L, CD74, CD80, CD125, CD147/basigin, CD152/CTLA-4, CD154/CD40L, CD195/CCR5, CD319/SLAMF7, and EGFR, and truncated versions thereof (e.g., versions preserving one or more extracellular epitopes but lacking one or more regions within the cytoplasmic domain). For example, CAR-expressing cells described herein may also express a truncated epidermal growth factor receptor (EGFR) which lacks signaling capacity but retains the epitope that is recognized by molecules capable of inducing ADCC, e.g., cetuximab (ERBITUX®), such that administration of cetuximab induces ADCC and subsequent depletion of the CAR-expressing cells (see, e.g., WO2011/056894, and Jonnalagadda et al., Gene Ther. 2013; 20(8)853-860). Another strategy includes expressing a highly compact marker/suicide gene that combines target epitopes from both CD32 and CD20 antigens in the CAR-expressing cells described herein, which binds rituximab, resulting in selective depletion of the CAR-expressing cells, e.g., by ADCC (see, e.g., Philip et al., Blood. 2014; 124(8)1277-1287). Other methods for depleting CAR-expressing cells described herein include administration of CAMPATH®, a monoclonal anti-CD52 antibody that selectively binds and targets mature lymphocytes, e.g., CAR-expressing cells, for destruction, e.g., by inducing ADCC. In other embodiments, CAR-expressing cells can be selectively targeted using a CAR ligand, e.g., an anti-idiotypic antibody. In some embodiments, the anti-idiotypic antibody can cause effector cell activity, e.g, ADCC or ADC activities, thereby reducing the number of CAR-expressing cells. In other embodiments, the CAR ligand, e.g., the anti-idiotypic antibody, can be coupled to an agent that induces cell killing, e.g., a toxin, thereby reducing the number of CAR-expressing cells. Alternatively, the CAR molecules themselves can be configured such that the activity can be regulated, e.g., turned on and off, as described below.

[0537] In some embodiments, a RCAR comprises a set of polypeptides, typically two in the simplest embodiments, in which the components of a standard CAR described herein, e.g., an antigen binding domain and an intracellular signaling domain, are partitioned on separate polypeptides or members. In some embodiments, the set of polypeptides include a dimerization switch that, upon the presence of a dimerization molecule, can couple the polypeptides to one another, e.g., can couple an antigen binding domain to an intracellular signaling domain. Additional description and exemplary configurations of such regulatable CARs are provided herein and in International Publiciation No. WO 2015/090229, hereby incorporated by reference in its entirety.

[0538] In an embodiment, an RCAR comprises two polypeptides or members: 1) an intracellular signaling member comprising an intracellular signaling domain, e.g., a primary intracellular signaling domain described herein, and a first switch domain; 2) an antigen binding member comprising an antigen binding domain, e.g., that targets a tumor antigen described herein, as described herein and a second switch domain Optionally, the RCAR comprises a transmembrane domain described herein. In an embodiment, a transmembrane domain can be disposed on the intracellular signaling member, on the antigen binding member, or on both. (Unless otherwise indicated, when members or elements of an RCAR are described herein, the order can be as provided, but other orders are included as well. In other words, in an embodiment, the order is as set out in the text, but in other embodiments, the order can be different. E.g., the order of elements on one side of a transmembrane region can be different from the example, e.g., the placement of a switch domain relative to a intracellular signaling domain can be different, e.g., reversed).

[0539] In an embodiment, the first and second switch domains can form an intracellular or an extracellular dimerization switch. In an embodiment, the dimerization switch can be a homodimerization switch, e.g., where the first and second switch domain are the same, or a heterodimerization switch, e.g., where the first and second switch domain are different from one another.

[0540] In embodiments, an RCAR can comprise a “multi switch.” A multi switch can comprise heterodimerization switch domains or homodimerization switch domains. A multi switch comprises a plurality of, e.g., 2, 3, 4, 5, 6, 7, 8, 9, or 10, switch domains, independently, on a first member, e.g., an antigen binding member, and a second member, e.g., an intracellular signaling member. In an embodiment, the first member can comprise a plurality of first switch domains, e.g., FKBP-based switch domains, and the second member can comprise a plurality of second switch domains, e.g., FRB-based switch domains. In an embodiment, the first member can comprise a first and a second switch domain, e.g., a FKBP-based switch domain and a FRB-based switch domain, and the second member can comprise a first and a second switch domain, e.g., a FKBP-based switch domain and a FRB-based switch domain.

[0541] In an embodiment, the intracellular signaling member comprises one or more intracellular signaling domains, e.g., a primary intracellular signaling domain and one or more costimulatory signaling domains.

[0542] In an embodiment, the antigen binding member may comprise one or more intracellular signaling domains, e.g., one or more costimulatory signaling domains. In an embodiment, the antigen binding member comprises a plurality, e.g., 2 or 3 costimulatory signaling domains described herein, e.g., selected from 4-1BB, CD28, CD27, ICOS, and OX40, and in embodiments, no primary intracellular signaling domain. In an embodiment, the antigen binding member comprises the following costimulatory signaling domains, from the extracellular to intracellular direction: 4-1BB-CD27; 4-1BB-CD27; CD27-4-1BB; 4-1BB-CD28; CD28-4-1BB; OX40-CD28; CD28-OX40; CD28-4-1BB; or 4-1BB-CD28. In such embodiments, the intracellular binding member comprises a CD3zeta domain. In one such embodiment the RCAR comprises (1) an antigen binding member comprising, an antigen binding domain, a transmembrane domain, and two costimulatory domains and a first switch domain; and (2) an intracellular signaling domain comprising a transmembrane domain or membrane tethering domain and at least one primary intracellular signaling domain, and a second switch domain.

[0543] An embodiment provides RCARs wherein the antigen binding member is not tethered to the surface of the CAR cell. This allows a cell having an intracellular signaling member to be conveniently paired with one or more antigen binding domains, without transforming the cell with a sequence that encodes the antigen binding member. In such embodiments, the RCAR comprises: 1) an intracellular signaling member comprising: a first switch domain, a transmembrane domain, an intracellular signaling domain, e.g., a primary intracellular signaling domain, and a first switch domain; and 2) an antigen binding member comprising: an antigen binding domain, and a second switch domain, wherein the antigen binding member does not comprise a transmembrane domain or membrane tethering domain, and, optionally, does not comprise an intracellular signaling domain. In some embodiments, the RCAR may further comprise 3) a second antigen binding member comprising: a second antigen binding domain, e.g., a second antigen binding domain that binds a different antigen than is bound by the antigen binding domain; and a second switch domain.

[0544] Also provided herein are RCARs wherein the antigen binding member comprises bispecific activation and targeting capacity. In this embodiment, the antigen binding member can comprise a plurality, e.g., 2, 3, 4, or 5 antigen binding domains, e.g., scFvs, wherein each antigen binding domain binds to a target antigen, e.g. different antigens or the same antigen, e.g., the same or different epitopes on the same antigen. In an embodiment, the plurality of antigen binding domains are in tandem, and optionally, a linker or hinge region is disposed between each of the antigen binding domains. Suitable linkers and hinge regions are described herein.

[0545] An embodiment provides RCARs having a configuration that allows switching of proliferation. In this embodiment, the RCAR comprises: 1) an intracellular signaling member comprising: optionally, a transmembrane domain or membrane tethering domain; one or more co-stimulatory signaling domain, e.g., selected from 4-1BB, CD28, CD27, ICOS, and OX40, and a switch domain; and 2) an antigen binding member comprising: an antigen binding domain, a transmembrane domain, and a primary intracellular signaling domain, e.g., a CD3zeta domain, wherein the antigen binding member does not comprise a switch domain, or does not comprise a switch domain that dimerizes with a switch domain on the intracellular signaling member. In an embodiment, the antigen binding member does not comprise a co-stimulatory signaling domain. In an embodiment, the intracellular signaling member comprises a switch domain from a homodimerization switch. In an embodiment, the intracellular signaling member comprises a first switch domain of a heterodimerization switch and the RCAR comprises a second intracellular signaling member which comprises a second switch domain of the heterodimerization switch. In such embodiments, the second intracellular signaling member comprises the same intracellular signaling domains as the intracellular signaling member. In an embodiment, the dimerization switch is intracellular. In an embodiment, the dimerization switch is extracellular.

[0546] In any of the RCAR configurations described here, the first and second switch domains comprise a FKBP-FRB based switch as described herein.

[0547] Also provided herein are cells comprising an RCAR described herein. Any cell that is engineered to express a RCAR can be used as a RCARX cell. In an embodiment the RCARX cell is a T cell, and is referred to as a RCART cell. In an embodiment the RCARX cell is an NK cell, and is referred to as a RCARN cell.

[0548] Also provided herein are nucleic acids and vectors comprising RCAR encoding sequences. Sequence encoding various elements of an RCAR can be disposed on the same nucleic acid molecule, e.g., the same plasmid or vector, e.g., viral vector, e.g., lentiviral vector. In an embodiment, (i) sequence encoding an antigen binding member and (ii) sequence encoding an intracellular signaling member, can be present on the same nucleic acid, e.g., vector. Production of the corresponding proteins can be achieved, e.g., by the use of separate promoters, or by the use of a bicistronic transcription product (which can result in the production of two proteins by cleavage of a single translation product or by the translation of two separate protein products). In an embodiment, a sequence encoding a cleavable peptide, e.g., a P2A or F2A sequence, is disposed between (i) and (ii). In an embodiment, a sequence encoding an IRES, e.g., an EMCV or EV71 IRES, is disposed between (i) and (ii). In these embodiments, (i) and (ii) are transcribed as a single RNA. In an embodiment, a first promoter is operably linked to (i) and a second promoter is operably linked to (ii), such that (i) and (ii) are transcribed as separate mRNAs.

[0549] Alternatively, the sequence encoding various elements of an RCAR can be disposed on the different nucleic acid molecules, e.g., different plasmids or vectors, e.g., viral vector, e.g., lentiviral vector. E.g., the (i) sequence encoding an antigen binding member can be present on a first nucleic acid, e.g., a first vector, and the (ii) sequence encoding an intracellular signaling member can be present on the second nucleic acid, e.g., the second vector.

### Dimerization Switches

[0550] Dimerization switches can be non-covalent or covalent. In a non-covalent dimerization switch, the dimerization molecule promotes a non-covalent interaction between the switch domains. In a covalent dimerization switch, the dimerization molecule promotes a covalent interaction between the switch domains.

[0551] In an embodiment, the RCAR comprises a FKBP/FRAP, or FKBP/FRB-based dimerization switch. FKBP12 (FKBP, or FK506 binding protein) is an abundant cytoplasmic protein that serves as the initial intracellular target for the natural product immunosuppressive drug, rapamycin. Rapamycin binds to FKBP and to the large PI3K homolog FRAP (RAFT, mTOR). FRB is a 93 amino acid portion of FRAP, that is sufficient for binding the FKBP-rapamycin complex (Chen, J., Zheng, X. F., Brown, E. J. & Schreiber, S. L. (1995) Identification of an 11-kDa FKBP12-rapamycin-binding domain within the 289-kDa FKBP12-rapamycin-associated protein and characterization of a critical serine residue. Proc Natl Acad Sci USA 92: 4947-51.)

[0552] In embodiments, an FKBP/FRAP, e.g., an FKBP/FRB, based switch can use a dimerization molecule, e.g., rapamycin or a rapamycin analog.

[0553] The amino acid sequence of FKBP is as follows:

(SEQ ID NO: 275)

DVPDYASLGGPSSPKKKRKVSRGVQVETISPGDGRTFPKRGQTCVVHYTG
MLEDGKKFDSSRDRNKPFKFMLGKQEVIRGWEEGVAQMSVGQRAKLTISP
DYAYGATGHPGIIPPHATLVFDVELLKLETSY

[0554] In embodiments, an FKBP switch domain can comprise a fragment of FKBP having the ability to bind with FRB, or a fragment or analog thereof, in the presence of rapamycin or a rapalog, e.g., the underlined portion of SEQ ID NO: 275, which is:

(SEQ ID NO: 276)

VQVETISPGDGRTFPKRGQTCVVHYTGMLEDGKKFDSSRDRNKPFKFMLG
KQEVIRGWEEGVAQMSVGQRAKLTISPDYAYGATGHPGIIPPHATLVFDV
ELLKLETS

[0555] The amino acid sequence of FRB is as follows:

(SEQ ID NO: 277)

[sequence omitted]

[0556] “FKBP/FRAP, e.g., an FKBP/FRB, based switch” as that term is used herein, refers to a dimerization switch comprising: a first switch domain, which comprises an FKBP fragment or analog thereof having the ability to bind with FRB, or a fragment or analog thereof, in the presence of rapamycin or a rapalog, e.g., RAD001, and has at least 70, 75, 80, 85, 90, 95, 96, 97, 98, or 99% identity with, or differs by no more than 30, 25, 20, 15, 10, 5, 4, 3, 2, or 1 amino acid residues from, the FKBP sequence of SEQ ID NO: 275 or 276; and a second switch domain, which comprises an FRB fragment or analog thereof having the ability to bind with FRB, or a fragment or analog thereof, in the presence of rapamycin or a rapalog, and has at least 70, 75, 80, 85, 90, 95, 96, 97, 98, or 99% identity with, or differs by no more than 30, 25, 20, 15, 10, 5, 4, 3, 2, or 1 amino acid residues from, the FRB sequence of SEQ ID NO: 277. In an embodiment, a RCAR described herein comprises one switch domain comprises amino acid residues disclosed in SEQ ID NO: 275 (or SEQ ID NO: 276), and one switch domain comprises amino acid residues disclosed in SEQ ID NO: 277.

[0557] In embodiments, the FKBP/FRB dimerization switch comprises a modified FRB switch domain that exhibits altered, e.g., enhanced, complex formation between an FRB-based switch domain, e.g., the modified FRB switch domain, a FKBP-based switch domain, and the dimerization molecule, e.g., rapamycin or a rapalogue, e.g., RAD001. In an embodiment, the modified FRB switch domain comprises one or more mutations, e.g., 2, 3, 4, 5, 6, 7, 8, 9, 10 or more, selected from mutations at amino acid position(s) L2031, E2032, 52035, R2036, F2039, G2040, T2098, W2101, D2102, Y2105, and F2108, where the wild-type amino acid is mutated to any other naturally-occurring amino acid. In an embodiment, a mutant FRB comprises a mutation at E2032, where E2032 is mutated to phenylalanine (E2032F), methionine (E2032M), arginine (E2032R), valine (E2032V), tyrosine (E2032Y), isoleucine (E20321), e.g., SEQ ID NO: 278, or leucine (E2032L), e.g., SEQ ID NO: 279. In an embodiment, a mutant FRB comprises a mutation at T2098, where T2098 is mutated to phenylalanine (T2098F) or leucine (T2098L), e.g., SEQ ID NO: 280. In an embodiment, a mutant FRB comprises a mutation at E2032 and at T2098, where E2032 is mutated to any amino acid, and where T2098 is mutated to any amino acid, e.g., SEQ ID NO: 281. In an embodiment, a mutant FRB comprises an E20321 and a T2098L mutation, e.g., SEQ ID NO: 282. In an embodiment, a mutant FRB comprises an E2032L and a T2098L mutation, e.g., SEQ ID NO: 283.

TABLE 17
Exemplary mutant FRB having increased affinity
for a dimerization molecule.

| | | EQ |
|---|---|---|
| | | ID |
| FRB mutant | Amino Acid Sequence | NO: |
| E2032I mutant | ILWHEMWHEGLIEASRLYFGERNVKGMFEVLEPLHAMMERGPQTLKETSF | 78 |
| | NQAYGRDLMEAQEWCRKYMKSGNVKDLTQAWDLYYHVFRRISKTS | |
| E2032L mutant | ILWHEMWHEGLLEASRLYFGERNVKGMFEVLEPLHAMMERGPQTLKETSF | 79 |
| | NQAYGRDLMEAQEWCRKYMKSGNVKDLTQAWDLYYHVFRRISKTS | |
| T2098L mutant | ILWHEMWHEGLEEASRLYFGERNVKGMFEVLEPLHAMMERGPQTLKETSF | 80 |
| | NQAYGRDLMEAQEWCRKYMKSGNVKDLLQAWDLYYHVFRRISKTS | |
| E2032, T2098 | ILWHEMWHEGLXEASRLYFGERNVKGMFEVLEPLHAMMERGPQTLKETSF | 81 |
| mutant | NQAYGRDLMEAQEWCRKYMKSGNVKDLXQAWDLYYHVFRRISKTS | |
| E2032I, T2098L | ILWHEMWHEGLIEASRLYFGERNVKGMFEVLEPLHAMMERGPQTLKETSF | 82 |
| mutant | NQAYGRDLMEAQEWCRKYMKSGNVKDLLQAWDLYYHVFRRISKTS | |
| E2032L, T2098L | ILWHEMWHEGLLEASRLYFGERNVKGMFEVLEPLHAMMERGPQTLKETSF | 83 |
| mutant | NQAYGRDLMEAQEWCRKYMKSGNVKDLLQAWDLYYHVFRRISKTS | |

[0558] Other suitable dimerization switches include a GyrB-GyrB based dimerization switch, a Gibberellin-based dimerization switch, a tag/binder dimerization switch, and a halo-tag/snap-tag dimerization switch. Following the guidance provided herein, such switches and relevant dimerization molecules will be apparent to one of ordinary skill.

[0559] Dimerization Molecule

[0560] Association between the switch domains is promoted by the dimerization molecule. In the presence of dimerization molecule interaction or association between switch domains allows for signal transduction between a polypeptide associated with, e.g., fused to, a first switch domain, and a polypeptide associated with, e.g., fused to, a second switch domain. In the presence of non-limiting levels of dimerization molecule signal transduction is increased by 1.1, 1.2, 1.3, 1.4, 1.5, 1.6, 1.7, 1.8, 1.9, 2, 5, 10, 50, 100 fold, e.g., as measured in a system described herein.

[0561] Rapamycin and rapamycin analogs (sometimes referred to as rapalogues), e.g., RAD001, can be used as dimerization molecules in a FKBP/FRB-based dimerization switch described herein. In an embodiment the dimerization molecule can be selected from rapamycin (sirolimus), RAD001 (everolimus), zotarolimus, temsirolimus, AP-23573 (ridaforolimus), biolimus and AP21967. Additional rapamycin analogs suitable for use with FKBP/FRB-based dimerization switches are further described in the section entitled “Combination Therapies”, or in the subsection entitled “Combination with a Low, Immune Enhancing, Dose of an mTOR inhibitor”.

### Split CAR

[0562] In some embodiments, the CAR-expressing cell uses a split CAR. The split CAR approach is described in more detail in publications WO2014/055442 and WO2014/055657, incorporated herein by reference. Briefly, a split CAR system comprises a cell expressing a first CAR having a first antigen binding domain and a costimulatory domain (e.g., 41BB), and the cell also expresses a second CAR having a second antigen binding domain and an intracellular signaling domain (e.g., CD3 zeta). When the cell encounters the first antigen, the costimulatory domain is activated, and the cell proliferates. When the cell encounters the second antigen, the intracellular signaling domain is activated and cell-killing activity begins. Thus, the CAR-expressing cell is only fully activated in the presence of both antigens. In embodiments the first antigen binding domain recognizes BCMA, e.g., comprises an antigen binding domain described herein, and the second antigen binding domain recognizes an antigen expressed on acute myeloid leukemia cells, e.g., CD123, CLL-1, CD34, FLT3, or folate receptor beta. In embodiments the first antigen binding domain recognizes BCMA, e.g., comprises an antigen binding domain described herein, and the second antigen binding domain recognizes an antigen expressed on B-cells, e.g., CD10, CD19, CD20, CD22, CD34, CD123, FLT-3, ROR1, CD79b, CD179b, or CD79a.

[0563] Stability and Mutations

[0564] The stability of an anti-BCMA binding domain, e.g., scFv molecules (e.g., soluble scFv) can be evaluated in reference to the biophysical properties (e.g., thermal stability) of a conventional control scFv molecule or a full length antibody. In one embodiment, the humanized scFv has a thermal stability that is greater than about 0.1, about 0.25, about 0.5, about 0.75, about 1, about 1.25, about 1.5, about 1.75, about 2, about 2.5, about 3, about 3.5, about 4, about 4.5, about 5, about 5.5, about 6, about 6.5, about 7, about 7.5, about 8, about 8.5, about 9, about 9.5, about 10 degrees, about 11 degrees, about 12 degrees, about 13 degrees, about 14 degrees, or about 15 degrees Celsius than a control binding molecule (e.g. a conventional scFv molecule) in the described assays.

[0565] The improved thermal stability of the anti-BCMA binding domain, e.g., scFv is subsequently conferred to the entire CART-BCMA construct, leading to improved therapeutic properties of the CART-BCMA construct. The thermal stability of the anti-BCMA binding domain, e.g., scFv can be improved by at least about 2° C. or 3° C. as compared to a conventional antibody. In one embodiment, the anti-BCMA binding domain, e.g., scFv has a 1° C. improved thermal stability as compared to a conventional antibody. In another embodiment, the anti-BCMA binding domain, e.g., scFv has a 2° C. improved thermal stability as compared to a conventional antibody. In another embodiment, the scFv has a 4, 5, 6, 7, 8, 9, 10, 11, 12, 13, 14, 15° C. improved thermal stability as compared to a conventional antibody. Comparisons can be made, for example, between the scFv molecules disclosed herein and scFv molecules or Fab fragments of an antibody from which the scFv VH and VL were derived. Thermal stability can be measured using methods known in the art. For example, in one embodiment, Tm can be measured. Methods for measuring Tm and other methods of determining protein stability are described in more detail below.

[0566] Mutations in scFv (arising through humanization or direct mutagenesis of the soluble scFv) alter the stability of the scFv and improve the overall stability of the scFv and the CART33 construct. Stability of the human scFv can be compared against the murine scFv using measurements such as Tm, temperature denaturation and temperature aggregation.

[0567] The binding capacity of the mutant scFvs can be determined using assays described in the Examples.

[0568] In one embodiment, the anti-BCMA binding domain, e.g., scFv comprises at least one mutation arising from the humanization process such that the mutated scFv confers improved stability to the CART-BCMA construct. In another embodiment, the anti-BCMA binding domain, e.g., scFv comprises at least 1, 2, 3, 4, 5, 6, 7, 8, 9, 10 mutations arising from the humanization process such that the mutated scFv confers improved stability to the CART-BCMA construct.

[0569] Methods of Evaluating Protein Stability

[0570] The stability of an antigen binding domain may be assessed using, e.g., the methods described below. Such methods allow for the determination of multiple thermal unfolding transitions where the least stable domain either unfolds first or limits the overall stability threshold of a multidomain unit that unfolds cooperatively (e.g., a multidomain protein which exhibits a single unfolding transition). The least stable domain can be identified in a number of additional ways. Mutagenesis can be performed to probe which domain limits the overall stability. Additionally, protease resistance of a multidomain protein can be performed under conditions where the least stable domain is known to be intrinsically unfolded via DSC or other spectroscopic methods (Fontana, et al., (1997) Fold. Des., 2: R17-26; Dimasi et al. (2009) J. Mol. Biol. 393: 672-692). Once the least stable domain is identified, the sequence encoding this domain (or a portion thereof) may be employed as a test sequence in the methods. Methods of evaluating protein stability have been described in, e.g., pages 191-198 of WO 2016/014565, herein incorporated by reference in its entirety.

### RNA Transfection

[0571] Disclosed herein are methods for producing an in vitro transcribed RNA CAR. The present invention also includes a CAR encoding RNA construct that can be directly transfected into a cell. A method for generating mRNA for use in transfection can involve in vitro transcription (IVT) of a template with specially designed primers, followed by polyA addition, to produce a construct containing 3′ and 5′ untranslated sequence (“UTR”), a 5′ cap and/or Internal Ribosome Entry Site (IRES), the nucleic acid to be expressed, and a polyA tail, typically 50-2000 bases in length (SEQ ID NO:35). RNA so produced can efficiently transfect different kinds of cells. In one aspect, the template includes sequences for the CAR.

[0572] In one aspect the anti-BCMA CAR is encoded by a messenger RNA (mRNA). In one aspect the mRNA encoding the anti-BCMA CAR is introduced into an immune effector cell, e.g., a T cell or a NK cell, for production of a CAR-expressing cell (e.g., CART cell or CAR-expressing NK cell).

[0573] In one embodiment, the in vitro transcribed RNA CAR can be introduced to a cell as a form of transient transfection. The RNA is produced by in vitro transcription using a polymerase chain reaction (PCR)-generated template. DNA of interest from any source can be directly converted by PCR into a template for in vitro mRNA synthesis using appropriate primers and RNA polymerase. The source of the DNA can be, for example, genomic DNA, plasmid DNA, phage DNA, cDNA, synthetic DNA sequence or any other appropriate source of DNA. The desired temple for in vitro transcription is a CAR of the present invention. For example, the template for the RNA CAR comprises an extracellular region comprising a single chain variable domain of an anti-tumor antibody; a hinge region, a transmembrane domain (e.g., a transmembrane domain of CD8a); and a cytoplasmic region that includes an intracellular signaling domain, e.g., comprising the signaling domain of CD3-zeta and the signaling domain of 4-1BB.

[0574] In one embodiment, the DNA to be used for PCR contains an open reading frame. The DNA can be from a naturally occurring DNA sequence from the genome of an organism. In one embodiment, the nucleic acid can include some or all of the 5′ and/or 3′ untranslated regions (UTRs). The nucleic acid can include exons and introns. In one embodiment, the DNA to be used for PCR is a human nucleic acid sequence. In another embodiment, the DNA to be used for PCR is a human nucleic acid sequence including the 5′ and 3′ UTRs. The DNA can alternatively be an artificial DNA sequence that is not normally expressed in a naturally occurring organism. An exemplary artificial DNA sequence is one that contains portions of genes that are ligated together to form an open reading frame that encodes a fusion protein. The portions of DNA that are ligated together can be from a single organism or from more than one organism.

[0575] PCR is used to generate a template for in vitro transcription of mRNA which is used for transfection. Methods for performing PCR are well known in the art. Primers for use in PCR are designed to have regions that are substantially complementary to regions of the DNA to be used as a template for the PCR. “Substantially complementary,” as used herein, refers to sequences of nucleotides where a majority or all of the bases in the primer sequence are complementary, or one or more bases are non-complementary, or mismatched. Substantially complementary sequences are able to anneal or hybridize with the intended DNA target under annealing conditions used for PCR. The primers can be designed to be substantially complementary to any portion of the DNA template. For example, the primers can be designed to amplify the portion of a nucleic acid that is normally transcribed in cells (the open reading frame), including 5′ and 3′ UTRs. The primers can also be designed to amplify a portion of a nucleic acid that encodes a particular domain of interest. In one embodiment, the primers are designed to amplify the coding region of a human cDNA, including all or portions of the 5′ and 3′ UTRs. Primers useful for PCR can be generated by synthetic methods that are well known in the art. “Forward primers” are primers that contain a region of nucleotides that are substantially complementary to nucleotides on the DNA template that are upstream of the DNA sequence that is to be amplified. “Upstream” is used herein to refer to a location 5, to the DNA sequence to be amplified relative to the coding strand. “Reverse primers” are primers that contain a region of nucleotides that are substantially complementary to a double-stranded DNA template that are downstream of the DNA sequence that is to be amplified. “Downstream” is used herein to refer to a location 3′ to the DNA sequence to be amplified relative to the coding strand.

[0576] Any DNA polymerase useful for PCR can be used in the methods disclosed herein. The reagents and polymerase are commercially available from a number of sources.

[0577] Chemical structures with the ability to promote stability and/or translation efficiency may also be used. The RNA preferably has 5′ and 3′ UTRs. In one embodiment, the 5′ UTR is between one and 3000 nucleotides in length. The length of 5′ and 3′ UTR sequences to be added to the coding region can be altered by different methods, including, but not limited to, designing primers for PCR that anneal to different regions of the UTRs. Using this approach, one of ordinary skill in the art can modify the 5′ and 3′ UTR lengths required to achieve optimal translation efficiency following transfection of the transcribed RNA.

[0578] The 5′ and 3′ UTRs can be the naturally occurring, endogenous 5′ and 3′ UTRs for the nucleic acid of interest. Alternatively, UTR sequences that are not endogenous to the nucleic acid of interest can be added by incorporating the UTR sequences into the forward and reverse primers or by any other modifications of the template. The use of UTR sequences that are not endogenous to the nucleic acid of interest can be useful for modifying the stability and/or translation efficiency of the RNA. For example, it is known that AU-rich elements in 3′ UTR sequences can decrease the stability of mRNA. Therefore, 3′ UTRs can be selected or designed to increase the stability of the transcribed RNA based on properties of UTRs that are well known in the art.

[0579] In one embodiment, the 5′ UTR can contain the Kozak sequence of the endogenous nucleic acid. Alternatively, when a 5′ UTR that is not endogenous to the nucleic acid of interest is being added by PCR as described above, a consensus Kozak sequence can be redesigned by adding the 5′ UTR sequence. Kozak sequences can increase the efficiency of translation of some RNA transcripts, but does not appear to be required for all RNAs to enable efficient translation. The requirement for Kozak sequences for many mRNAs is known in the art. In other embodiments the 5′ UTR can be 5′UTR of an RNA virus whose RNA genome is stable in cells. In other embodiments various nucleotide analogues can be used in the 3′ or 5′ UTR to impede exonuclease degradation of the mRNA.

[0580] To enable synthesis of RNA from a DNA template without the need for gene cloning, a promoter of transcription should be attached to the DNA template upstream of the sequence to be transcribed. When a sequence that functions as a promoter for an RNA polymerase is added to the 5′ end of the forward primer, the RNA polymerase promoter becomes incorporated into the PCR product upstream of the open reading frame that is to be transcribed. In one preferred embodiment, the promoter is a T7 polymerase promoter, as described elsewhere herein. Other useful promoters include, but are not limited to, T3 and SP6 RNA polymerase promoters. Consensus nucleotide sequences for T7, T3 and SP6 promoters are known in the art.

[0581] In a preferred embodiment, the mRNA has both a cap on the 5′ end and a 3′ poly(A) tail which determine ribosome binding, initiation of translation and stability mRNA in the cell. On a circular DNA template, for instance, plasmid DNA, RNA polymerase produces a long concatameric product which is not suitable for expression in eukaryotic cells. The transcription of plasmid DNA linearized at the end of the 3′ UTR results in normal sized mRNA which is not effective in eukaryotic transfection even if it is polyadenylated after transcription.

[0582] On a linear DNA template, phage T7 RNA polymerase can extend the 3′ end of the transcript beyond the last base of the template (Schenborn and Mierendorf, Nuc Acids Res., 13:6223-36 (1985); Nacheva and Berzal-Herranz, Eur. J. Biochem., 270:1485-65 (2003).

[0583] The conventional method of integration of polyA/T stretches into a DNA template is molecular cloning. However polyA/T sequence integrated into plasmid DNA can cause plasmid instability, which is why plasmid DNA templates obtained from bacterial cells are often highly contaminated with deletions and other aberrations. This makes cloning procedures not only laborious and time consuming but often not reliable. That is why a method which allows construction of DNA templates with polyA/T 3′ stretch without cloning highly desirable.

[0584] The polyA/T segment of the transcriptional DNA template can be produced during PCR by using a reverse primer containing a polyT tail, such as 100T tail (SEQ ID NO: 31) (size can be 50-5000 T (SEQ ID NO: 32)), or after PCR by any other method, including, but not limited to, DNA ligation or in vitro recombination. Poly(A) tails also provide stability to RNAs and reduce their degradation. Generally, the length of a poly(A) tail positively correlates with the stability of the transcribed RNA. In one embodiment, the poly(A) tail is between 100 and 5000 adenosines (SEQ ID NO: 33).

[0585] Poly(A) tails of RNAs can be further extended following in vitro transcription with the use of a poly(A) polymerase, such as E. coli polyA polymerase (E-PAP). In one embodiment, increasing the length of a poly(A) tail from 100 nucleotides to between 300 and 400 nucleotides (SEQ ID NO: 34) results in about a two-fold increase in the translation efficiency of the RNA. Additionally, the attachment of different chemical groups to the 3′ end can increase mRNA stability. Such attachment can contain modified/artificial nucleotides, aptamers and other compounds. For example, ATP analogs can be incorporated into the poly(A) tail using poly(A) polymerase. ATP analogs can further increase the stability of the RNA.

[0586] 5′ caps on also provide stability to RNA molecules. In a preferred embodiment, RNAs produced by the methods disclosed herein include a 5′ cap. The 5′ cap is provided using techniques known in the art and described herein (Cougot, et al., Trends in Biochem. Sci., 29:436-444 (2001); Stepinski, et al., RNA, 7:1468-95 (2001); Elango, et al., Biochim. Biophys. Res. Commun., 330:958-966 (2005)).

[0587] The RNAs produced by the methods disclosed herein can also contain an internal ribosome entry site (IRES) sequence. The IRES sequence may be any viral, chromosomal or artificially designed sequence which initiates cap-independent ribosome binding to mRNA and facilitates the initiation of translation. Any solutes suitable for cell electroporation, which can contain factors facilitating cellular permeability and viability such as sugars, peptides, lipids, proteins, antioxidants, and surfactants can be included.

[0588] RNA can be introduced into target cells using any of a number of different methods, for instance, commercially available methods which include, but are not limited to, electroporation (Amaxa Nucleofector-II (Amaxa Biosystems, Cologne, Germany)), (ECM 830 (BTX) (Harvard Instruments, Boston, Mass.) or the Gene Pulser II (BioRad, Denver, Colo.), Multiporator (Eppendort, Hamburg Germany), cationic liposome mediated transfection using lipofection, polymer encapsulation, peptide mediated transfection, or biolistic particle delivery systems such as “gene guns” (see, for example, Nishikawa, et al. Hum Gene Ther., 12(8):861-70 (2001).

[0589] Non-Viral Delivery Methods

[0590] In some aspects, non-viral methods can be used to deliver a nucleic acid encoding a CAR described herein into a cell or tissue or a subject.

[0591] In some embodiments, the non-viral method includes the use of a transposon (also called a transposable element). In some embodiments, a transposon is a piece of DNA that can insert itself at a location in a genome, for example, a piece of DNA that is capable of self-replicating and inserting its copy into a genome, or a piece of DNA that can be spliced out of a longer nucleic acid and inserted into another place in a genome. For example, a transposon comprises a DNA sequence made up of inverted repeats flanking genes for transposition.

[0592] Exemplary methods of nucleic acid delivery using a transposon include a Sleeping Beauty transposon system (SBTS) and a piggyBac (PB) transposon system. See, e.g., Aronovich et al. Hum. Mol. Genet. 20.R1(2011):R14-20; Singh et al. Cancer Res. 15(2008):2961-2971; Huang et al. Mol. Ther. 16(2008):580-589; Grabundzija et ab. Mob. Ther. 18(2010):1200-1209; Kebriaei et ab. Blood. 122.21(2013):166; Williams Molecular Therapy 16.9(2008):1515-16; Bell et al. Nat. Protoc. 2.12(2007):3153-65; and Ding et al. Cell. 122.3(2005):473-83, all of which are incorporated herein by reference.

[0593] The SBTS includes two components: 1) a transposon containing a transgene and 2) a source of transposase enzyme. The transposase can transpose the transposon from a carrier plasmid (or other donor DNA) to a target DNA, such as a host cell chromosome/genome. For example, the transposase binds to the carrier plasmid/donor DNA, cuts the transposon (including transgene(s)) out of the plasmid, and inserts it into the genome of the host cell. See, e.g., Aronovich et al. supra.

[0594] Exemplary transposons include a pT2-based transposon. See, e.g., Grabundzija et al. Nucleic Acids Res. 41.3(2013):1829-47; and Singh et al. Cancer Res. 68.8(2008): 2961-2971, all of which are incorporated herein by reference. Exemplary transposases include a Tc1/mariner-type transposase, e.g., the SB10 transposase or the SB11 transposase (a hyperactive transposase which can be expressed, e.g., from a cytomegalovirus promoter). See, e.g., Aronovich et al.; Kebriaei et al.; and Grabundzija et al., all of which are incorporated herein by reference.

[0595] Use of the SBTS permits efficient integration and expression of a transgene, e.g., a nucleic acid encoding a CAR described herein. Provided herein are methods of generating a cell, e.g., T cell or NK cell, that stably expresses a CAR described herein, e.g., using a transposon system such as SBTS.

[0596] In accordance with methods described herein, in some embodiments, one or more nucleic acids, e.g., plasmids, containing the SBTS components are delivered to a cell (e.g., T or NK cell). For example, the nucleic acid(s) are delivered by standard methods of nucleic acid (e.g., plasmid DNA) delivery, e.g., methods described herein, e.g., electroporation, transfection, or lipofection. In some embodiments, the nucleic acid contains a transposon comprising a transgene, e.g., a nucleic acid encoding a CAR described herein. In some embodiments, the nucleic acid contains a transposon comprising a transgene (e.g., a nucleic acid encoding a CAR described herein) as well as a nucleic acid sequence encoding a transposase enzyme. In other embodiments, a system with two nucleic acids is provided, e.g., a dual-plasmid system, e.g., where a first plasmid contains a transposon comprising a transgene, and a second plasmid contains a nucleic acid sequence encoding a transposase enzyme. For example, the first and the second nucleic acids are co-delivered into a host cell.

[0597] In some embodiments, cells, e.g., T or NK cells, are generated that express a CAR described herein by using a combination of gene insertion using the SBTS and genetic editing using a nuclease (e.g., Zinc finger nucleases (ZFNs), Transcription Activator-Like Effector Nucleases (TALENs), the CRISPR/Cas system, or engineered meganuclease re-engineered homing endonucleases).

[0598] In some embodiments, use of a non-viral method of delivery permits reprogramming of cells, e.g., T or NK cells, and direct infusion of the cells into a subject. Advantages of non-viral vectors include but are not limited to the ease and relatively low cost of producing sufficient amounts required to meet a patient population, stability during storage, and lack of immunogenicity.

### Nucleic Acid Constructs Encoding a CAR

[0599] The present invention also provides nucleic acid molecules encoding one or more CAR constructs described herein. In one aspect, the nucleic acid molecule is provided as a messenger RNA transcript. In one aspect, the nucleic acid molecule is provided as a DNA construct.

[0600] Accordingly, in one aspect, the invention pertains to an isolated nucleic acid molecule encoding a chimeric antigen receptor (CAR), wherein the CAR comprises a anti-BCMA binding domain (e.g., a human anti-BCMA binding domain), a transmembrane domain, and an intracellular signaling domain comprising a stimulatory domain, e.g., a costimulatory signaling domain and/or a primary signaling domain, e.g., zeta chain. In one embodiment, the anti-BCMA binding domain is an anti-BCMA binding domain described herein, e.g., an anti-BCMA binding domain which comprises a sequence selected from a group consisting of SEQ ID NO: 39, SEQ ID NO: 40, SEQ ID NO: 41, SEQ ID NO: 42, SEQ ID NO: 43, SEQ ID NO: 44, SEQ ID NO: 45, SEQ ID NO: 46, SEQ ID NO: 47, SEQ ID NO: 48, SEQ ID NO: 49, SEQ ID NO: 50, SEQ ID NO: 51, SEQ ID NO: 52, SEQ ID NO: 53, SEQ ID NO: 129, SEQ ID NO: 130, SEQ ID NO: 131, SEQ ID NO: 132, SEQ ID NO: 133, SEQ ID NO: 134, SEQ ID NO: 135, SEQ ID NO: 136, SEQ ID NO: 137, SEQ ID NO: 138, SEQ ID NO: 139, SEQ ID NO: 140, SEQ ID NO: 141, SEQ ID NO: 142, SEQ ID NO: 143, SEQ ID NO:144, SEQ ID NO:145, SEQ ID NO:146, SEQ ID NO:147, SEQ ID NO:148 or SEQ ID NO:149, or a sequence with 95-99% identify thereof. In one embodiment, the transmembrane domain is transmembrane domain of a protein selected from the group consisting of the alpha, beta or zeta chain of the T-cell receptor, CD28, CD3 epsilon, CD45, CD4, CD5, CD8, CD9, CD16, CD22, CD33, CD37, CD64, CD80, CD86, CD134, CD137 and CD154. In one embodiment, the transmembrane domain comprises a sequence of SEQ ID NO: 6, or a sequence with 95-99% identity thereof. In one embodiment, the anti-BCMA binding domain is connected to the transmembrane domain by a hinge region, e.g., a hinge described herein. In one embodiment, the hinge region comprises SEQ ID NO:2 or SEQ ID NO:3 or SEQ ID NO:4 or SEQ ID NO:5, or a sequence with 95-99% identity thereof. In one embodiment, the isolated nucleic acid molecule further comprises a sequence encoding a costimulatory domain. In one embodiment, the costimulatory domain is a functional signaling domain of a protein selected from the group consisting of MHC class I molecule, TNF receptor proteins, Immunoglobulin-like proteins, cytokine receptors, integrins, signaling lymphocytic activation molecules (SLAM proteins), activating NK cell receptors, BTLA, a Toll ligand receptor, OX40, CD2, CD7, CD27, CD28, CD30, CD40, CD5, ICAM-1, LFA-1 (CD11a/CD18), 4-1BB (CD137), B7-H3, CDS, ICAM-1, ICOS (CD278), GITR, BAFFR, LIGHT, HVEM (LIGHTR), KIRDS2, SLAMF7, NKp80 (KLRF1), NKp44, NKp30, NKp46, CD19, CD4, CD8alpha, CD8beta, IL2R beta, IL2R gamma, IL7R alpha, ITGA4, VLA1, CD49a, ITGA4, IA4, CD49D, ITGA6, VLA-6, CD49f, ITGAD, CD11d, ITGAE, CD103, ITGAL, CD11a, LFA-1, ITGAM, CD11b, ITGAX, CD11c, ITGB1, CD29, ITGB2, CD18, LFA-1, ITGB7, NKG2D, NKG2C, TNFR2, TRANCE/RANKL, DNAM1 (CD226), SLAMF4 (CD244, 2B4), CD84, CD96 (Tactile), CEACAM1, CRTAM, Ly9 (CD229), CD160 (BY55), PSGL1, CD100 (SEMA4D), CD69, SLAMF6 (NTB-A, Ly108), SLAM (SLAMF1, CD150, IPO-3), BLAME (SLAMF8), SELPLG (CD162), LTBR, LAT, GADS, SLP-76, PAG/Cbp, CD19a, and a ligand that specifically binds with CD83. In one embodiment, the costimulatory domain comprises a sequence of SEQ ID NO:7, or a sequence with 95-99% identity thereof or a CD27 costimulatory domain having a sequence of SEQ ID NO:8 (or a sequence with 95-99% identity thereof) or a CD28 costimulatory domain having a sequence of SEQ ID NO:379 (or a sequence with 95-99% identity thereof) or a ICOS costimulatory domain having a sequence of SEQ ID NO: 381 (or a sequence with 95-99% identity thereof). In one embodiment, the intracellular signaling domain comprises a functional signaling domain of 4-1BB and a functional signaling domain of CD3 zeta. In one embodiment, the intracellular signaling domain comprises the sequence of SEQ ID NO: 7 or SEQ ID NO: 8, or a sequence with 95-99% identity thereof, and the sequence of SEQ ID NO: 9 or SEQ ID NO:10, or a sequence with 95-99% identity thereof, wherein the sequences comprising the intracellular signaling domain are expressed in the same frame and as a single polypeptide chain.

[0601] In another aspect, the invention pertains to an isolated nucleic acid molecule encoding a CAR construct comprising a leader sequence of SEQ ID NO: 1, a scFv domain having a sequence selected from the group consisting of SEQ ID NO: 39, SEQ ID NO: 40, SEQ ID NO: 41, SEQ ID NO: 42, SEQ ID NO: 43, SEQ ID NO: 44, SEQ ID NO: 45, SEQ ID NO: 46, SEQ ID NO: 47, SEQ ID NO: 48, SEQ ID NO: 49, SEQ ID NO: 50, SEQ ID NO: 51, SEQ ID NO: 52, SEQ ID NO: 53, SEQ ID NO: 129, SEQ ID NO: 130, SEQ ID NO: 131, SEQ ID NO: 132, SEQ ID NO: 133, SEQ ID NO: 134, SEQ ID NO: 135, SEQ ID NO: 136, SEQ ID NO: 137, SEQ ID NO: 138, SEQ ID NO: 139, SEQ ID NO: 140, SEQ ID NO: 141, SEQ ID NO: 142, SEQ ID NO: 143, SEQ ID NO:144, SEQ ID NO:145, SEQ ID NO:146, SEQ ID NO:147, SEQ ID NO:148 or SEQ ID NO:149 (or a sequence with 95-99% identify thereof), a hinge region of SEQ ID NO:2 or SEQ ID NO:3 or SEQ ID NO:4 or SEQ ID NO:5 (or a sequence with 95-99% identity thereof), a transmembrane domain having a sequence of SEQ ID NO: 6 (or a sequence with 95-99% identity thereof), a 4-1BB costimulatory domain having a sequence of SEQ ID NO:7 or a CD27 costimulatory domain having a sequence of SEQ ID NO:8 (or a sequence with 95-99% identity thereof) or a CD28 costimulatory domain having a sequence of SEQ ID NO:1104 (or a sequence with 95-99% identity thereof) or a ICOS costimulatory domain having a sequence of SEQ ID NO: 1106 (or a sequence with 95-99% identity thereof), and a CD3 zeta stimulatory domain having a sequence of SEQ ID NO:9 or SEQ ID NO:10 (or a sequence with 95-99% identity thereof).

[0602] In another aspect, the invention pertains to an isolated polypeptide molecule encoded by the nucleic acid molecule. In one embodiment, the isolated polypeptide molecule comprises a sequence selected from the group consisting of SEQ ID NO: 39, SEQ ID NO: 40, SEQ ID NO: 41, SEQ ID NO: 42, SEQ ID NO: 43, SEQ ID NO: 44, SEQ ID NO: 45, SEQ ID NO: 46, SEQ ID NO: 47, SEQ ID NO: 48, SEQ ID NO: 49, SEQ ID NO: 50, SEQ ID NO: 51, SEQ ID NO: 52, SEQ ID NO: 53, SEQ ID NO: 129, SEQ ID NO: 130, SEQ ID NO: 131, SEQ ID NO: 132, SEQ ID NO: 133, SEQ ID NO: 134, SEQ ID NO: 135, SEQ ID NO: 136, SEQ ID NO: 137, SEQ ID NO: 138, SEQ ID NO: 139, SEQ ID NO: 140, SEQ ID NO: 141, SEQ ID NO: 142, SEQ ID NO: 143, SEQ ID NO:144, SEQ ID NO:145, SEQ ID NO:146, SEQ ID NO:147, SEQ ID NO:148 and SEQ ID NO:149, or a sequence with 95-99% identify thereof.

[0603] In another aspect, the invention pertains to a nucleic acid molecule encoding a chimeric antigen receptor (CAR) molecule that comprises an anti-BCMA binding domain, a transmembrane domain, and an intracellular signaling domain comprising a stimulatory domain, and wherein said anti-BCMA binding domain comprises a sequence selected from the group consisting of SEQ ID NO: 39, SEQ ID NO: 40, SEQ ID NO: 41, SEQ ID NO: 42, SEQ ID NO: 43, SEQ ID NO: 44, SEQ ID NO: 45, SEQ ID NO: 46, SEQ ID NO: 47, SEQ ID NO: 48, SEQ ID NO: 49, SEQ ID NO: 50, SEQ ID NO: 51, SEQ ID NO: 52, SEQ ID NO: 53, SEQ ID NO: 129, SEQ ID NO: 130, SEQ ID NO: 131, SEQ ID NO: 132, SEQ ID NO: 133, SEQ ID NO: 134, SEQ ID NO: 135, SEQ ID NO: 136, SEQ ID NO: 137, SEQ ID NO: 138, SEQ ID NO: 139, SEQ ID NO: 140, SEQ ID NO: 141, SEQ ID NO: 142, SEQ ID NO: 143, SEQ ID NO:144, SEQ ID NO:145, SEQ ID NO:146, SEQ ID NO:147, SEQ ID NO:148 and SEQ ID NO:149, or a sequence with 95-99% identify thereof.

[0604] In one embodiment, the encoded CAR molecule further comprises a sequence encoding a costimulatory domain. In one embodiment, the costimulatory domain is a functional signaling domain of a protein, e.g., described herein, e.g., selected from the group consisting of MHC class I molecule, TNF receptor proteins, Immunoglobulin-like proteins, cytokine receptors, integrins, signaling lymphocytic activation molecules (SLAM proteins), activating NK cell receptors, BTLA, a Toll ligand receptor, OX40, CD2, CD7, CD27, CD28, CD30, CD40, CDS, ICAM-1, LFA-1 (CD11a/CD18), 4-1BB (CD137), B7-H3, CDS, ICAM-1, ICOS (CD278), GITR, BAFFR, LIGHT, HVEM (LIGHTR), KIRDS2, SLAMF7, NKp80 (KLRF1), NKp44, NKp30, NKp46, CD19, CD4, CD8alpha, CD8beta, IL2R beta, IL2R gamma, IL7R alpha, ITGA4, VLA1, CD49a, ITGA4, IA4, CD49D, ITGA6, VLA-6, CD49f, ITGAD, CD11d, ITGAE, CD103, ITGAL, CD11a, LFA-1, ITGAM, CD11 b, ITGAX, CD11c, ITGB1, CD29, ITGB2, CD18, LFA-1, ITGB7, NKG2D, NKG2C, TNFR2, TRANCE/RANKL, DNAM1 (CD226), SLAMF4 (CD244, 2B4), CD84, CD96 (Tactile), CEACAM1, CRTAM, Ly9 (CD229), CD160 (BY55), PSGL1, CD100 (SEMA4D), CD69, SLAMF6 (NTB-A, Ly108), SLAM (SLAMF1, CD150, IPO-3), BLAME (SLAMF8), SELPLG (CD162), LTBR, LAT, GADS, SLP-76, PAG/Cbp, CD19a, and a ligand that specifically binds with CD83. In one embodiment, the costimulatory domain comprises a sequence of SEQ ID NO:7. In one embodiment, the transmembrane domain is a transmembrane domain of a protein, e.g., described herein, e.g., selected from the group consisting of the alpha, beta or zeta chain of the T-cell receptor, CD28, CD3 epsilon, CD45, CD4, CD5, CD8, CD9, CD16, CD22, CD33, CD37, CD64, CD80, CD86, CD134, CD137 and CD154. In one embodiment, the transmembrane domain comprises a sequence of SEQ ID NO:6. In one embodiment, the intracellular signaling domain comprises a functional signaling domain of 4-1BB and a functional signaling domain of zeta. In one embodiment, the intracellular signaling domain comprises the sequence of SEQ ID NO: 7 and the sequence of SEQ ID NO: 9, wherein the sequences comprising the intracellular signaling domain are expressed in the same frame and as a single polypeptide chain. In one embodiment, the anti-BCMAbinding domain is connected to the transmembrane domain by a hinge region. In one embodiment, the hinge region comprises SEQ ID NO:2. In one embodiment, the hinge region comprises SEQ ID NO:3 or SEQ ID NO:4 or SEQ ID NO:5.

[0605] In another aspect, the invention pertains to an encoded CAR molecule comprising a leader sequence of SEQ ID NO: 1, a scFv domain having a sequence selected from the group consisting of SEQ ID NO: 39, SEQ ID NO: 40, SEQ ID NO: 41, SEQ ID NO: 42, SEQ ID NO: 43, SEQ ID NO: 44, SEQ ID NO: 45, SEQ ID NO: 46, SEQ ID NO: 47, SEQ ID NO: 48, SEQ ID NO: 49, SEQ ID NO: 50, SEQ ID NO: 51, SEQ ID NO: 52, SEQ ID NO: 53, SEQ ID NO: 129, SEQ ID NO: 130, SEQ ID NO: 131, SEQ ID NO: 132, SEQ ID NO: 133, SEQ ID NO: 134, SEQ ID NO: 135, SEQ ID NO: 136, SEQ ID NO: 137, SEQ ID NO: 138, SEQ ID NO: 139, SEQ ID NO: 140, SEQ ID NO: 141, SEQ ID NO: 142, SEQ ID NO: 143, SEQ ID NO:144, SEQ ID NO:145, SEQ ID NO:146, SEQ ID NO:147, SEQ ID NO:148 and SEQ ID NO:149, or a sequence with 95-99% identify thereof, a hinge region of SEQ ID NO:2 or SEQ ID NO:3 or SEQ ID NO:4 or SEQ ID NO:5, a transmembrane domain having a sequence of SEQ ID NO: 6, a 4-1BB costimulatory domain having a sequence of SEQ ID NO:7, or a CD27 costimulatory domain having a sequence of SEQ ID NO:8, or a CD28 costimulatory domain having a sequence of SEQ ID NO:1104 (or a sequence with 95-99% identity thereof) or a ICOS costimulatory domain having a sequence of SEQ ID NO: 1106 (or a sequence with 95-99% identity thereof), and a CD3 zeta stimulatory domain having a sequence of SEQ ID NO:9 or SEQ ID NO:10. In one embodiment, the encoded CAR molecule comprises a sequence selected from a group consisting of residues 22-483 of SEQ ID NO: 109, residues 22-490 of SEQ ID NO: 99, residues 22-488 of SEQ ID NO: 100, residues 22-487 of SEQ ID NO: 101, residues 22-493 of SEQ ID NO: 102, residues 22-490 of SEQ ID NO: 103, residues 22-491 of SEQ ID NO: 104, residues 22-482 of SEQ ID NO: 105, residues 22-483 of SEQ ID NO: 106, residues 22-485 of SEQ ID NO: 107, residues 22-483 of SEQ ID NO: 108, residues 22-490 of SEQ ID NO: 110, residues 22-483 of SEQ ID NO: 111, residues 22-484 of SEQ ID NO: 112, residues 22-485 of SEQ ID NO: 113, residues 22-487 of SEQ ID NO: 213, residues 23-489 of SEQ ID NO: 214, residues 22-490 of SEQ ID NO: 215, residues 22-484 of SEQ ID NO: 216, residues 22-485 of SEQ ID NO: 217, residues 22-489 of SEQ ID NO: 218, residues 22-497 of SEQ ID NO: 219, residues 22-492 of SEQ ID NO: 220, residues 22-490 of SEQ ID NO: 221, residues 22-485 of SEQ ID NO: 222, residues 22-492 of SEQ ID NO: 223, residues 22-492 of SEQ ID NO: 224, residues 22-483 of SEQ ID NO: 225, residues 22-490 of SEQ ID NO: 226, residues 22-485 of SEQ ID NO: 227, residues 22-486 of SEQ ID NO: 228, residues 22-492 of SEQ ID NO: 229, residues 22-488 of SEQ ID NO: 230, residues 22-488 of SEQ ID NO: 231, residues 22-495 of SEQ ID NO: 232, residues 22-490 of SEQ ID NO: 233, or a sequence with 95-99% identify thereof.

[0606] The nucleic acid sequences coding for the desired molecules can be obtained using recombinant methods known in the art, such as, for example by screening libraries from cells expressing the gene, by deriving the gene from a vector known to include the same, or by isolating directly from cells and tissues containing the same, using standard techniques. Alternatively, the gene of interest can be produced synthetically, rather than cloned.

[0607] The present invention also provides vectors in which a DNA of the present invention is inserted. Vectors derived from retroviruses such as the lentivirus are suitable tools to achieve long-term gene transfer since they allow long-term, stable integration of a transgene and its propagation in daughter cells. Lentiviral vectors have the added advantage over vectors derived from onco-retroviruses such as murine leukemia viruses in that they can transduce non-proliferating cells, such as hepatocytes. They also have the added advantage of low immunogenicity. A retroviral vector may also be, e.g., a gammaretroviral vector. A gammaretroviral vector may include, e.g., a promoter, a packaging signal (w), a primer binding site (PBS), one or more (e.g., two) long terminal repeats (LTR), and a transgene of interest, e.g., a gene encoding a CAR. A gammaretroviral vector may lack viral structural gens such as gag, pol, and env. Exemplary gammaretroviral vectors include Murine Leukemia Virus (MLV), Spleen-Focus Forming Virus (SFFV), and Myeloproliferative Sarcoma Virus (MPSV), and vectors derived therefrom. Other gammaretroviral vectors are described, e.g., in Tobias Maetzig et al., “Gammaretroviral Vectors: Biology, Technology and Application” Viruses. 2011 June; 3(6): 677-713.

[0608] In another embodiment, the vector comprising the nucleic acid encoding the desired CAR of the invention is an adenoviral vector (A5/35). In another embodiment, the expression of nucleic acids encoding CARs can be accomplished using of transposons such as sleeping beauty, CRISPR, CAS9, and zinc finger nucleases. See below June et al. 2009Nature Reviews Immunology 9.10: 704-716, is incorporated herein by reference.

[0609] In brief summary, the expression of natural or synthetic nucleic acids encoding CARs is typically achieved by operably linking a nucleic acid encoding the CAR polypeptide or portions thereof to a promoter, and incorporating the construct into an expression vector. The vectors can be suitable for replication and integration eukaryotes. Typical cloning vectors contain transcription and translation terminators, initiation sequences, and promoters useful for regulation of the expression of the desired nucleic acid sequence.

[0610] The expression constructs of the present invention may also be used for nucleic acid immunization and gene therapy, using standard gene delivery protocols. Methods for gene delivery are known in the art. See, e.g., U.S. Pat. Nos. 5,399,346, 5,580,859, 5,589,466, incorporated by reference herein in their entireties. In another embodiment, the invention provides a gene therapy vector.

[0611] The nucleic acid can be cloned into a number of types of vectors. For example, the nucleic acid can be cloned into a vector including, but not limited to a plasmid, a phagemid, a phage derivative, an animal virus, and a cosmid. Vectors of particular interest include expression vectors, replication vectors, probe generation vectors, and sequencing vectors.

[0612] Further, the expression vector may be provided to a cell in the form of a viral vector. Viral vector technology is well known in the art and is described, for example, in Sambrook et al., 2012, MOLECULAR CLONING: A LABORATORY MANUAL, volumes 1-4, Cold Spring Harbor Press, NY), and in other virology and molecular biology manuals. Viruses, which are useful as vectors include, but are not limited to, retroviruses, adenoviruses, adeno-associated viruses, herpes viruses, and lentiviruses. In general, a suitable vector contains an origin of replication functional in at least one organism, a promoter sequence, convenient restriction endonuclease sites, and one or more selectable markers, (e.g., WO 01/96584; WO 01/29058; and U.S. Pat. No. 6,326,193).

[0613] A number of viral based systems have been developed for gene transfer into mammalian cells. For example, retroviruses provide a convenient platform for gene delivery systems. A selected gene can be inserted into a vector and packaged in retroviral particles using techniques known in the art. The recombinant virus can then be isolated and delivered to cells of the subject either in vivo or ex vivo. A number of retroviral systems are known in the art. In some embodiments, adenovirus vectors are used. A number of adenovirus vectors are known in the art. In one embodiment, lentivirus vectors are used.

[0614] Additional promoter elements, e.g., enhancers, regulate the frequency of transcriptional initiation. Typically, these are located in the region 30-110 bp upstream of the start site, although a number of promoters have been shown to contain functional elements downstream of the start site as well. The spacing between promoter elements frequently is flexible, so that promoter function is preserved when elements are inverted or moved relative to one another. In the thymidine kinase (tk) promoter, the spacing between promoter elements can be increased to 50 bp apart before activity begins to decline. Depending on the promoter, it appears that individual elements can function either cooperatively or independently to activate transcription.

[0615] An example of a promoter that is capable of expressing a CAR transgene in a mammalian T cell is the EF1a promoter. The native EF 1a promoter drives expression of the alpha subunit of the elongation factor-1 complex, which is responsible for the enzymatic delivery of aminoacyl tRNAs to the ribosome. The EF1a promoter has been extensively used in mammalian expression plasmids and has been shown to be effective in driving CAR expression from transgenes cloned into a lentiviral vector. See, e.g., Milone et al., Mol. Ther. 17(8): 1453-1464 (2009). In one aspect, the EF1a promoter comprises the sequence provided as SEQ ID NO:11.

[0616] Another example of a promoter is the immediate early cytomegalovirus (CMV) promoter sequence. This promoter sequence is a strong constitutive promoter sequence capable of driving high levels of expression of any polynucleotide sequence operatively linked thereto. However, other constitutive promoter sequences may also be used, including, but not limited to the simian virus 40 (SV40) early promoter, mouse mammary tumor virus (MMTV), human immunodeficiency virus (HIV) long terminal repeat (LTR) promoter, MoMuLV promoter, an avian leukemia virus promoter, an Epstein-Barr virus immediate early promoter, a Rous sarcoma virus promoter, as well as human gene promoters such as, but not limited to, the actin promoter, the myosin promoter, the elongation factor-1α promoter, the hemoglobin promoter, and the creatine kinase promoter. Further, the invention should not be limited to the use of constitutive promoters. Inducible promoters are also contemplated as part of the invention. The use of an inducible promoter provides a molecular switch capable of turning on expression of the polynucleotide sequence which it is operatively linked when such expression is desired, or turning off the expression when expression is not desired. Examples of inducible promoters include, but are not limited to a metallothionine promoter, a glucocorticoid promoter, a progesterone promoter, and a tetracycline promoter.

[0617] Another example of a promoter is the phosphoglycerate kinase (PGK) promoter. In embodiments, a truncated PGK promoter (e.g., a PGK promoter with one or more, e.g., 1, 2, 5, 10, 100, 200, 300, or 400, nucleotide deletions when compared to the wild-type PGK promoter sequence) may be desired. The nucleotide sequences of exemplary PGK promoters are provided below.

[0618] WT PGK Promoter

(SEQ ID NO: 1109)

ACCCCTCTCTCCAGCCACTAAGCCAGTTGCTCCCTCGGCTGACGGCTGCA
CGCGAGGCCTCCGAACGTCTTACGCCTTGTGGCGCGCCCGTCCTTGTCCC
GGGTGTGATGGCGGGGTGTGGGGCGGAGGGCGTGGCGGGGAAGGGCCGGC
GACGAGAGCCGCGCGGGACGACTCGTCGGCGATAACCGGTGTCGGGTAGC
GCCAGCCGCGCGACGGTAACGAGGGACCGCGACAGGCAGACGCTCCCATG
ATCACTCTGCACGCCGAAGGCAAATAGTGCAGGCCGTGCGGCGCTTGGCG
TTCCTTGGAAGGGCTGAATCCCCGCCTCGTCCTTCGCAGCGGCCCCCCGG
GTGTTCCCATCGCCGCTTCTAGGCCCACTGCGACGCTTGCCTGCACTTCT
TACACGCTCTGGGTCCCAGCCGCGGCGACGCAAAGGGCCTTGGTGCGGGT
CTCGTCGGCGCAGGGACGCGTTTGGGTCCCGACGGAACCTTTTCCGCGTT
GGGGTTGGGGCACCATAAGCT

### Exemplary Truncated PGK Promoters:

PGK100:

(SEQ ID NO: 1110)

ACCCCTCTCTCCAGCCACTAAGCCAGTTGCTCCCTCGGCTGACGGCTGCA
CGCGAGGCCTCCGAACGTCTTACGCCTTGTGGCGCGCCCGTCCTTGTCCC
GGGTGTGATGGCGGGGTG
PGK200:

(SEQ ID NO: 1111)

ACCCCTCTCTCCAGCCACTAAGCCAGTTGCTCCCTCGGCTGACGGCTGCA
CGCGAGGCCTCCGAACGTCTTACGCCTTGTGGCGCGCCCGTCCTTGTCCC
GGGTGTGATGGCGGGGTGTGGGGCGGAGGGCGTGGCGGGGAAGGGCCGGC
GACGAGAGCCGCGCGGGACGACTCGTCGGCGATAACCGGTGTCGGGTAGC
GCCAGCCGCGCGACGGTAACG
PGK300:

(SEQ ID NO: 1112)

ACCCCTCTCTCCAGCCACTAAGCCAGTTGCTCCCTCGGCTGACGGCTGCA
CGCGAGGCCTCCGAACGTCTTACGCCTTGTGGCGCGCCCGTCCTTGTCCC
GGGTGTGATGGCGGGGTGTGGGGCGGAGGGCGTGGCGGGGAAGGGCCGGC
GACGAGAGCCGCGCGGGACGACTCGTCGGCGATAACCGGTGTCGGGTAGC
GCCAGCCGCGCGACGGTAACGAGGGACCGCGACAGGCAGACGCTCCCATG
ATCACTCTGCACGCCGAAGGCAAATAGTGCAGGCCGTGCGGCGCTTGGCG
TTCCTTGGAAGGGCTGAATCCCCG
PGK400:

(SEQ ID NO: 1113)

ACCCCTCTCTCCAGCCACTAAGCCAGTTGCTCCCTCGGCTGACGGCTGCA
CGCGAGGCCTCCGAACGTCTTACGCCTTGTGGCGCGCCCGTCCTTGTCCC
GGGTGTGATGGCGGGGTGTGGGGCGGAGGGCGTGGCGGGGAAGGGCCGGC
GACGAGAGCCGCGCGGGACGACTCGTCGGCGATAACCGGTGTCGGGTAGC
GCCAGCCGCGCGACGGTAACGAGGGACCGCGACAGGCAGACGCTCCCATG
ATCACTCTGCACGCCGAAGGCAAATAGTGCAGGCCGTGCGGCGCTTGGCG
TTCCTTGGAAGGGCTGAATCCCCGCCTCGTCCTTCGCAGCGGCCCCCCGG
GTGTTCCCATCGCCGCTTCTAGGCCCACTGCGACGCTTGCCTGCACTTCT
TACACGCTCTGGGTCCCAGCCG

[0620] A vector may also include, e.g., a signal sequence to facilitate secretion, a polyadenylation signal and transcription terminator (e.g., from Bovine Growth Hormone (BGH) gene), an element allowing episomal replication and replication in prokaryotes (e.g. SV40 origin and ColE1 or others known in the art) and/or elements to allow selection (e.g., ampicillin resistance gene and/or zeocin marker).

[0621] In order to assess the expression of a CAR polypeptide or portions thereof, the expression vector to be introduced into a cell can also contain either a selectable marker gene or a reporter gene or both to facilitate identification and selection of expressing cells from the population of cells sought to be transfected or infected through viral vectors. In other aspects, the selectable marker may be carried on a separate piece of DNA and used in a co-transfection procedure. Both selectable markers and reporter genes may be flanked with appropriate regulatory sequences to enable expression in the host cells. Useful selectable markers include, for example, antibiotic-resistance genes, such as neo and the like.

[0622] Reporter genes are used for identifying potentially transfected cells and for evaluating the functionality of regulatory sequences. In general, a reporter gene is a gene that is not present in or expressed by the recipient organism or tissue and that encodes a polypeptide whose expression is manifested by some easily detectable property, e.g., enzymatic activity. Expression of the reporter gene is assayed at a suitable time after the DNA has been introduced into the recipient cells. Suitable reporter genes may include genes encoding luciferase, beta-galactosidase, chloramphenicol acetyl transferase, secreted alkaline phosphatase, or the green fluorescent protein gene (e.g., Ui-Tei et al., 2000 FEBS Letters 479: 79-82). Suitable expression systems are well known and may be prepared using known techniques or obtained commercially. In general, the construct with the minimal 5′ flanking region showing the highest level of expression of reporter gene is identified as the promoter. Such promoter regions may be linked to a reporter gene and used to evaluate agents for the ability to modulate promoter-driven transcription.

[0623] In one embodiment, the vector can further comprise a nucleic acid encoding a second CAR. In one embodiment, the second CAR includes an antigen binding domain to a target expressed on acute myeloid leukemia cells, such as, e.g., CD123, CD34, CLL-1, folate receptor beta, or FLT3; or a target expressed on a B cell, e.g., CD10, CD19, CD20, CD22, CD34, CD123, FLT-3, ROR1, CD79b, CD179b, or CD79a. In one embodiment, the vector comprises a nucleic acid sequence encoding a first CAR that specifically binds a first antigen and includes an intracellular signaling domain having a costimulatory signaling domain but not a primary signaling domain, and a nucleic acid encoding a second CAR that specifically binds a second, different, antigen and includes an intracellular signaling domain having a primary signaling domain but not a costimulatory signaling domain. In one embodiment, the vector comprises a nucleic acid encoding a first BCMA CAR that includes a BCMA binding domain, a transmembrane domain and a costimulatory domain and a nucleic acid encoding a second CAR that targets an antigen other than BCMA (e.g., an antigen expressed on AML cells, e.g., CD123, CD34, CLL-1, folate receptor beta, or FLT3; or an antigen expressed on a B cell, e.g., CD10, CD19, CD20, CD22, CD34, CD123, FLT-3, ROR1, CD79b, CD179b, or CD79a) and includes an antigen binding domain, a transmembrane domain and a primary signaling domain. In another embodiment, the vector comprises a nucleic acid encoding a first BCMA CAR that includes a BCMA binding domain, a transmembrane domain and a primary signaling domain and a nucleic acid encoding a second CAR that specifically binds an antigen other than BCMA (e.g., an antigen expressed on AML cells, e.g., CD123, CD34, CLL-1, folate receptor beta, or FLT3; or an antigen expressed on a B cell, e.g., CD10, CD19, CD20, CD22, CD34, CD123, FLT-3, ROR1, CD79b, CD179b, or CD79a) and includes an antigen binding domain to the antigen, a transmembrane domain and a costimulatory signaling domain.

[0624] In one embodiment, the vector comprises a nucleic acid encoding a BCMA CAR described herein and a nucleic acid encoding an inhibitory CAR. In one embodiment, the inhibitory CAR comprises an antigen binding domain that binds an antigen found on normal cells but not cancer cells, e.g., normal cells that also express BCMA. In one embodiment, the inhibitory CAR comprises the antigen binding domain, a transmembrane domain and an intracellular domain of an inhibitory molecule. For example, the intracellular domain of the inhibitory CAR can be an intracellular domain of PD1, PD-L1, PD-L2, CTLA4, TIM3, CEACAM (e.g., CEACAM-1, CEACAM-3 and/or CEACAM-5), LAG3, VISTA, BTLA, TIGIT, LAIR1, CD160, 2B4, CD80, CD86, B7-H3 (CD276), B7-H4 (VTCN1), HVEM (TNFRSF14 or CD270), KIR, A2aR, MHC class I, MHC class II, GALS, adenosine, and TGFR beta.

[0625] In embodiments, the vector may comprise two or more nucleic acid sequences encoding a CAR, e.g., a BCMA CAR described herein and a second CAR, e.g., an inhibitory CAR or a CAR that specifically binds to an antigen other than BCMA (e.g., an antigen expressed on AML cells, e.g., CD123, CLL-1, CD34, FLT3, or folate receptor beta; or antigen expression B cells, e.g., CD10, CD19, CD20, CD22, CD34, CD123, FLT-3, ROR1, CD79b, CD179b, or CD79a). In such embodiments, the two or more nucleic acid sequences encoding the CAR are encoded by a single nucleic molecule in the same frame and as a single polypeptide chain. In this aspect, the two or more CARs, can, e.g., be separated by one or more peptide cleavage sites. (e.g., an auto-cleavage site or a substrate for an intracellular protease). Examples of peptide cleavage sites include the following, wherein the GSG residues are optional:

T2A:

(SEQ ID NO: 1114)

(GSG) E G R G S L L T C G D V E E N P G P
P2A:

(SEQ ID NO: 1115)

(GSG) A T N F S L L K Q A G D V E E N P G P
E2A:

(SEQ ID NO: 1116)

(GSG) Q C T N Y A L L K L A G D V E S N P G P
F2A:

(SEQ ID NO: 1117)

(GSG) V K Q T L N F D L L K L A G D V E S N P G P

[0626] Methods of introducing and expressing genes into a cell are known in the art. In the context of an expression vector, the vector can be readily introduced into a host cell, e.g, mammalian, bacterial, yeast, or insect cell by any method in the art. For example, the expression vector can be transferred into a host cell by physical, chemical, or biological means.

[0627] Physical methods for introducing a polynucleotide into a host cell include calcium phosphate precipitation, lipofection, particle bombardment, microinjection, electroporation, and the like. Methods for producing cells comprising vectors and/or exogenous nucleic acids are well-known in the art. See, for example, Sambrook et al., 2012, MOLECULAR CLONING: A LABORATORY MANUAL, volumes 1-4, Cold Spring Harbor Press, NY). A preferred method for the introduction of a polynucleotide into a host cell is calcium phosphate transfection

[0628] Biological methods for introducing a polynucleotide of interest into a host cell include the use of DNA and RNA vectors. Viral vectors, and especially retroviral vectors, have become the most widely used method for inserting genes into mammalian, e.g., human cells. Other viral vectors can be derived from lentivirus, poxviruses, herpes simplex virus I, adenoviruses and adeno-associated viruses, and the like. See, for example, U.S. Pat. Nos. 5,350,674 and 5,585,362.

[0629] Chemical means for introducing a polynucleotide into a host cell include colloidal dispersion systems, such as macromolecule complexes, nanocapsules, microspheres, beads, and lipid-based systems including oil-in-water emulsions, micelles, mixed micelles, and liposomes. An exemplary colloidal system for use as a delivery vehicle in vitro and in vivo is a liposome (e.g., an artificial membrane vesicle). Other methods of state-of-the-art targeted delivery of nucleic acids are available, such as delivery of polynucleotides with targeted nanoparticles or other suitable sub-micron sized delivery system.

[0630] In the case where a non-viral delivery system is utilized, an exemplary delivery vehicle is a liposome. The use of lipid formulations is contemplated for the introduction of the nucleic acids into a host cell (in vitro, ex vivo or in vivo). In another aspect, the nucleic acid may be associated with a lipid. The nucleic acid associated with a lipid may be encapsulated in the aqueous interior of a liposome, interspersed within the lipid bilayer of a liposome, attached to a liposome via a linking molecule that is associated with both the liposome and the oligonucleotide, entrapped in a liposome, complexed with a liposome, dispersed in a solution containing a lipid, mixed with a lipid, combined with a lipid, contained as a suspension in a lipid, contained or complexed with a micelle, or otherwise associated with a lipid. Lipid, lipid/DNA or lipid/expression vector associated compositions are not limited to any particular structure in solution. For example, they may be present in a bilayer structure, as micelles, or with a “collapsed” structure. They may also simply be interspersed in a solution, possibly forming aggregates that are not uniform in size or shape. Lipids are fatty substances which may be naturally occurring or synthetic lipids. For example, lipids include the fatty droplets that naturally occur in the cytoplasm as well as the class of compounds which contain long-chain aliphatic hydrocarbons and their derivatives, such as fatty acids, alcohols, amines, amino alcohols, and aldehydes.

[0631] Lipids suitable for use can be obtained from commercial sources. For example, dimyristyl phosphatidylcholine (“DMPC”) can be obtained from Sigma, St. Louis, Mo.; dicetyl phosphate (“DCP”) can be obtained from K & K Laboratories (Plainview, N.Y.); cholesterol (“Choi”) can be obtained from Calbiochem-Behring; dimyristyl phosphatidylglycerol (“DMPG”) and other lipids may be obtained from Avanti Polar Lipids, Inc. (Birmingham, Ala.). Stock solutions of lipids in chloroform or chloroform/methanol can be stored at about −20° C. Chloroform is used as the only solvent since it is more readily evaporated than methanol. “Liposome” is a generic term encompassing a variety of single and multilamellar lipid vehicles formed by the generation of enclosed lipid bilayers or aggregates. Liposomes can be characterized as having vesicular structures with a phospholipid bilayer membrane and an inner aqueous medium. Multilamellar liposomes have multiple lipid layers separated by aqueous medium. They form spontaneously when phospholipids are suspended in an excess of aqueous solution. The lipid components undergo self-rearrangement before the formation of closed structures and entrap water and dissolved solutes between the lipid bilayers (Ghosh et al., 1991 Glycobiology 5: 505-10). However, compositions that have different structures in solution than the normal vesicular structure are also encompassed. For example, the lipids may assume a micellar structure or merely exist as nonuniform aggregates of lipid molecules. Also contemplated are lipofectamine-nucleic acid complexes.

[0632] Regardless of the method used to introduce exogenous nucleic acids into a host cell or otherwise expose a cell to the inhibitor of the present invention, in order to confirm the presence of the recombinant DNA sequence in the host cell, a variety of assays may be performed. Such assays include, for example, “molecular biological” assays well known to those of skill in the art, such as Southern and Northern blotting, RT-PCR and PCR; “biochemical” assays, such as detecting the presence or absence of a particular peptide, e.g., by immunological means (ELISAs and Western blots) or by assays described herein to identify agents falling within the scope of the invention.

[0633] The present invention further provides a vector comprising a CAR encoding nucleic acid molecule. In one aspect, a CAR vector can be directly transduced into a cell, e.g., a T cell or NK cell. In one aspect, the vector is a cloning or expression vector, e.g., a vector including, but not limited to, one or more plasmids (e.g., expression plasmids, cloning vectors, minicircles, minivectors, double minute chromosomes), retroviral and lentiviral vector constructs. In one aspect, the vector is capable of expressing the CAR construct in mammalian T cells or NK cells. In one aspect, the mammalian T cell is a human T cell. In one aspect, the mammalian NK cell is a human NK cell.

### Sources of Cells

[0634] Prior to expansion and genetic modification, a source of cells, e.g., immune effector cells (e.g., T cells or NK cells), is obtained from a subject. The term “subject” is intended to include living organisms in which an immune response can be elicited (e.g., mammals). Examples of subjects include humans, dogs, cats, mice, rats, and transgenic species thereof. T cells can be obtained from a number of sources, including peripheral blood mononuclear cells, bone marrow, lymph node tissue, cord blood, thymus tissue, tissue from a site of infection, ascites, pleural effusion, spleen tissue, and tumors.

[0635] In certain aspects of the present invention, any number of immune effector cell (e.g., T cell or NK cell) lines available in the art, may be used. In certain aspects of the present invention, T cells can be obtained from a unit of blood collected from a subject using any number of techniques known to the skilled artisan, such as Ficoll™ separation. In one preferred aspect, cells from the circulating blood of an individual are obtained by apheresis. The apheresis product typically contains lymphocytes, including T cells, monocytes, granulocytes, B cells, other nucleated white blood cells, red blood cells, and platelets. In one aspect, the cells collected by apheresis may be washed to remove the plasma fraction and to place the cells in an appropriate buffer or media for subsequent processing steps. In one aspect of the invention, the cells are washed with phosphate buffered saline (PBS). In an alternative aspect, the wash solution lacks calcium and may lack magnesium or may lack many if not all divalent cations.

[0636] Initial activation steps in the absence of calcium can lead to magnified activation. As those of ordinary skill in the art would readily appreciate a washing step may be accomplished by methods known to those in the art, such as by using a semi-automated “flow-through” centrifuge (for example, the Cobe 2991 cell processor, the Baxter CytoMate, or the Haemonetics Cell Saver 5) according to the manufacturer's instructions. After washing, the cells may be resuspended in a variety of biocompatible buffers, such as, for example, Ca-free, Mg-free PBS, PlasmaLyte A, or other saline solution with or without buffer. Alternatively, the undesirable components of the apheresis sample may be removed and the cells directly resuspended in culture media.

[0637] It is recognized that the methods of the application can utilize culture media conditions comprising 5% or less, for example 2%, human AB serum, and employ known culture media conditions and compositions, for example those described in Smith et al., “Ex vivo expansion of human T cells for adoptive immunotherapy using the novel Xeno-free CTS Immune Cell Serum Replacement” Clinical & Translational Immunology (2015) 4, e31; doi:10.1038/cti.2014.31.

[0638] In one aspect, T cells are isolated from peripheral blood lymphocytes by lysing the red blood cells and depleting the monocytes, for example, by centrifugation through a PERCOLL™ gradient or by counterflow centrifugal elutriation. A specific subpopulation of T cells, such as CD3+, CD4+, CD8+, CD45RA+, and/or CD45RO+ T cells, can be further isolated by positive or negative selection techniques. For example, in one aspect, T cells are isolated by incubation with anti-CD3/anti-CD28 (e.g., 3×28)-conjugated beads, such as DYNABEADS® M-450 CD3/CD28 T, for a time period sufficient for positive selection of the desired T cells. In one aspect, the time period is about 30 minutes. In a further aspect, the time period ranges from 30 minutes to 36 hours or longer and all integer values there between. In a further aspect, the time period is at least 1, 2, 3, 4, 5, or 6 hours. In yet another preferred aspect, the time period is 10 to 24 hours. In one aspect, the incubation time period is 24 hours. Longer incubation times may be used to isolate T cells in any situation where there are few T cells as compared to other cell types, such in isolating tumor infiltrating lymphocytes (TIL) from tumor tissue or from immunocompromised individuals. Further, use of longer incubation times can increase the efficiency of capture of CD8+ T cells. Thus, by simply shortening or lengthening the time T cells are allowed to bind to the CD3/CD28 beads and/or by increasing or decreasing the ratio of beads to T cells (as described further herein), subpopulations of T cells can be preferentially selected for or against at culture initiation or at other time points during the process. Additionally, by increasing or decreasing the ratio of anti-CD3 and/or anti-CD28 antibodies on the beads or other surface, subpopulations of T cells can be preferentially selected for or against at culture initiation or at other desired time points. The skilled artisan would recognize that multiple rounds of selection can also be used in the context of this invention. In certain aspects, it may be desirable to perform the selection procedure and use the “unselected” cells in the activation and expansion process. “Unselected” cells can also be subjected to further rounds of selection.

[0639] Enrichment of a T cell population by negative selection can be accomplished with a combination of antibodies directed to surface markers unique to the negatively selected cells. One method is cell sorting and/or selection via negative magnetic immunoadherence or flow cytometry that uses a cocktail of monoclonal antibodies directed to cell surface markers present on the cells negatively selected. For example, to enrich for CD4+ cells by negative selection, a monoclonal antibody cocktail typically includes antibodies to CD14, CD20, CD11b, CD16, HLA-DR, and CD8. In certain aspects, it may be desirable to enrich for or positively select for regulatory T cells which typically express CD4+, CD25+, CD62Lhi, GITR+, and FoxP3+. In certain aspects, it may be desirable to enrich for cells that are CD127low. Alternatively, in certain aspects, T regulatory cells are depleted by anti-C25 conjugated beads or other similar method of selection.

[0640] The methods described herein can include, e.g., selection of a specific subpopulation of immune effector cells, e.g., T cells, that are a T regulatory cell-depleted population, CD25+ depleted cells, using, e.g., a negative selection technique, e.g., described herein. Preferably, the population of T regulatory depleted cells contains less than 30%, 25%, 20%, 15%, 10%, 5%, 4%, 3%, 2%, 1% of CD25+ cells.

[0641] In one embodiment, T regulatory cells, e.g., CD25+ T cells, are removed from the population using an anti-CD25 antibody, or fragment thereof, or a CD25-binding ligand, IL-2. In one embodiment, the anti-CD25 antibody, or fragment thereof, or CD25-binding ligand is conjugated to a substrate, e.g., a bead, or is otherwise coated on a substrate, e.g., a bead. In one embodiment, the anti-CD25 antibody, or fragment thereof, is conjugated to a substrate as described herein.

[0642] In one embodiment, the T regulatory cells, e.g., CD25+ T cells, are removed from the population using CD25 depletion reagent from Miltenyi™. In one embodiment, the ratio of cells to CD25 depletion reagent is 1e7 cells to 20 uL, or 1e7 cells to 15 uL, or 1e7 cells to 10 uL, or 1e7 cells to 5 uL, or 1e7 cells to 2.5 uL, or 1e7 cells to 1.25 uL. In one embodiment, e.g., for T regulatory cells, e.g., CD25+ depletion, greater than 500 million cells/ml is used. In a further aspect, a concentration of cells of 600, 700, 800, or 900 million cells/ml is used.

[0643] In one embodiment, the population of immune effector cells to be depleted includes about 6×10⁹ CD25+ T cells. In other aspects, the population of immune effector cells to be depleted include about 1×10⁹ to 1×10¹⁰ CD25+ T cell, and any integer value in between. In one embodiment, the resulting population T regulatory depleted cells has 2×10⁹ T regulatory cells, e.g., CD25+ cells, or less (e.g., 1×10⁹, 5×10⁸, 1×10⁸, 5×10⁷, 1×10⁷, or less CD25+ cells).

[0644] In one embodiment, the T regulatory cells, e.g., CD25+ cells, are removed from the population using the CliniMAC system with a depletion tubing set, such as, e.g., tubing 162-01. In one embodiment, the CliniMAC system is run on a depletion setting such as, e.g., DEPLETION2.1.

[0645] Without wishing to be bound by a particular theory, decreasing the level of negative regulators of immune cells (e.g., decreasing the number of unwanted immune cells, e.g., T_{REG} cells), in a subject prior to apheresis or during manufacturing of a CAR-expressing cell product can reduce the risk of subject relapse. For example, methods of depleting T_{REG} cells are known in the art. Methods of decreasing T_{REG} cells include, but are not limited to, cyclophosphamide, anti-GITR antibody (an anti-GITR antibody described herein), CD25-depletion, and combinations thereof.

[0646] In some embodiments, the manufacturing methods comprise reducing the number of (e.g., depleting) T_{REG} cells prior to manufacturing of the CAR-expressing cell. For example, manufacturing methods comprise contacting the sample, e.g., the apheresis sample, with an anti-GITR antibody and/or an anti-CD25 antibody (or fragment thereof, or a CD25-binding ligand), e.g., to deplete T_{REG} cells prior to manufacturing of the CAR-expressing cell (e.g., T cell, NK cell) product.

[0647] In an embodiment, a subject is pre-treated with one or more therapies that reduce T_{REG} cells prior to collection of cells for CAR-expressing cell product manufacturing, thereby reducing the risk of subject relapse to CAR-expressing cell treatment. In an embodiment, methods of decreasing T_{REG} cells include, but are not limited to, administration to the subject of one or more of cyclophosphamide, anti-GITR antibody, CD25-depletion, or a combination thereof. Administration of one or more of cyclophosphamide, anti-GITR antibody, CD25-depletion, or a combination thereof, can occur before, during or after an infusion of the CAR-expressing cell product.

[0648] In an embodiment, a subject is pre-treated with cyclophosphamide prior to collection of cells for CAR-expressing cell product manufacturing, thereby reducing the risk of subject relapse to CAR-expressing cell treatment. In an embodiment, a subject is pre-treated with an anti-GITR antibody prior to collection of cells for CAR-expressing cell product manufacturing, thereby reducing the risk of subject relapse to CAR-expressing cell treatment.

[0649] In one embodiment, the population of cells to be removed are neither the regulatory T cells or tumor cells, but cells that otherwise negatively affect the expansion and/or function of CART cells, e.g. cells expressing CD14, CD11b, CD33, CD15, or other markers expressed by potentially immune suppressive cells. In one embodiment, such cells are envisioned to be removed concurrently with regulatory T cells and/or tumor cells, or following said depletion, or in another order.

[0650] The methods described herein can include more than one selection step, e.g., more than one depletion step. Enrichment of a T cell population by negative selection can be accomplished, e.g., with a combination of antibodies directed to surface markers unique to the negatively selected cells. One method is cell sorting and/or selection via negative magnetic immunoadherence or flow cytometry that uses a cocktail of monoclonal antibodies directed to cell surface markers present on the cells negatively selected. For example, to enrich for CD4+ cells by negative selection, a monoclonal antibody cocktail can include antibodies to CD14, CD20, CD11b, CD16, HLA-DR, and CD8.

[0651] The methods described herein can further include removing cells from the population which express a tumor antigen, e.g., a tumor antigen that does not comprise CD25, e.g., CD19, CD30, CD38, CD123, CD20, CD14 or CD11b, to thereby provide a population of T regulatory depleted, e.g., CD25+ depleted, and tumor antigen depleted cells that are suitable for expression of a CAR, e.g., a CAR described herein. In one embodiment, tumor antigen expressing cells are removed simultaneously with the T regulatory, e.g., CD25+ cells. For example, an anti-CD25 antibody, or fragment thereof, and an anti-tumor antigen antibody, or fragment thereof, can be attached to the same substrate, e.g., bead, which can be used to remove the cells or an anti-CD25 antibody, or fragment thereof, or the anti-tumor antigen antibody, or fragment thereof, can be attached to separate beads, a mixture of which can be used to remove the cells. In other embodiments, the removal of T regulatory cells, e.g., CD25+ cells, and the removal of the tumor antigen expressing cells is sequential, and can occur, e.g., in either order.

[0652] Also provided are methods that include removing cells from the population which express a check point inhibitor, e.g., a check point inhibitor described herein, e.g., one or more of PD1+ cells, LAG3+ cells, and TIM3+ cells, to thereby provide a population of T regulatory depleted, e.g., CD25+ depleted cells, and check point inhibitor depleted cells, e.g., PD1+, LAG3+ and/or TIM3+ depleted cells. Exemplary check point inhibitors include PD1, PD-L1, PD-L2, CTLA4, TIM3, CEACAM (e.g., CEACAM-1, CEACAM-3 and/or CEACAM-5), LAG3, VISTA, BTLA, TIGIT, LAIR1, CD160, 2B4, CD80, CD86, B7-H3 (CD276), B7-H4 (VTCN1), HVEM (TNFRSF14 or CD270), KIR, A2aR, MHC class I, MHC class II, GALS, adenosine, and TGFR beta. In embodiments, the checkpoint inhibitor is PD1 or PD-L1. In one embodiment, check point inhibitor expressing cells are removed simultaneously with the T regulatory, e.g., CD25+ cells. For example, an anti-CD25 antibody, or fragment thereof, and an anti-check point inhibitor antibody, or fragment thereof, can be attached to the same bead which can be used to remove the cells, or an anti-CD25 antibody, or fragment thereof, and the anti-check point inhibitor antibody, or fragment there, can be attached to separate beads, a mixture of which can be used to remove the cells. In other embodiments, the removal of T regulatory cells, e.g., CD25+ cells, and the removal of the check point inhibitor expressing cells is sequential, and can occur, e.g., in either order.

[0653] In one embodiment, a T cell population can be selected that expresses one or more of IFN-γ, TNFα, IL-17A, IL-2, IL-3, IL-4, GM-CSF, IL-10, IL-13, granzyme B, and perform, or other appropriate molecules, e.g., other cytokines. Methods for screening for cell expression can be determined, e.g., by the methods described in PCT Publication No.: WO 2013/126712.

[0654] For isolation of a desired population of cells by positive or negative selection, the concentration of cells and surface (e.g., particles such as beads) can be varied. In certain aspects, it may be desirable to significantly decrease the volume in which beads and cells are mixed together (e.g., increase the concentration of cells), to ensure maximum contact of cells and beads. For example, in one aspect, a concentration of 2 billion cells/ml is used. In one aspect, a concentration of 1 billion cells/ml is used. In a further aspect, greater than 100 million cells/ml is used. In a further aspect, a concentration of cells of 10, 15, 20, 25, 30, 35, 40, 45, or 50 million cells/ml is used. In yet one aspect, a concentration of cells from 75, 80, 85, 90, 95, or 100 million cells/ml is used. In further aspects, concentrations of 125 or 150 million cells/ml can be used. Using high concentrations can result in increased cell yield, cell activation, and cell expansion. Further, use of high cell concentrations allows more efficient capture of cells that may weakly express target antigens of interest, such as CD28-negative T cells, or from samples where there are many tumor cells present (e.g., leukemic blood, tumor tissue, etc.). Such populations of cells may have therapeutic value and would be desirable to obtain. For example, using high concentration of cells allows more efficient selection of CD8+ T cells that normally have weaker CD28 expression.

[0655] In a related aspect, it may be desirable to use lower concentrations of cells. By significantly diluting the mixture of T cells and surface (e.g., particles such as beads), interactions between the particles and cells is minimized. This selects for cells that express high amounts of desired antigens to be bound to the particles. For example, CD4+ T cells express higher levels of CD28 and are more efficiently captured than CD8+ T cells in dilute concentrations. In one aspect, the concentration of cells used is 5×10e6/ml. In other aspects, the concentration used can be from about 1×10⁵/m1 to 1×10⁶/ml, and any integer value in between.

[0656] In other aspects, the cells may be incubated on a rotator for varying lengths of time at varying speeds at either 2-10° C. or at room temperature.

[0657] T cells for stimulation can also be frozen after a washing step. Wishing not to be bound by theory, the freeze and subsequent thaw step provides a more uniform product by removing granulocytes and to some extent monocytes in the cell population. After the washing step that removes plasma and platelets, the cells may be suspended in a freezing solution. While many freezing solutions and parameters are known in the art and will be useful in this context, one method involves using PBS containing 20% DMSO and 8% human serum albumin, or culture media containing 10% Dextran 40 and 5% Dextrose, 20% Human Serum Albumin and 7.5% DMSO, or 31.25% Plasmalyte-A, 31.25% Dextrose 5%, 0.45% NaCl, 10% Dextran 40 and 5% Dextrose, 20% Human Serum Albumin, and 7.5% DMSO or other suitable cell freezing media containing for example, Hespan and PlasmaLyte A, the cells then are frozen to −80° C. at a rate of 1° per minute and stored in the vapor phase of a liquid nitrogen storage tank. Other methods of controlled freezing may be used as well as uncontrolled freezing immediately at −20° C. or in liquid nitrogen.

[0658] In certain aspects, cryopreserved cells are thawed and washed as described herein and allowed to rest for one hour at room temperature prior to activation using the methods of the present invention.

[0659] Also contemplated in the context of the invention is the collection of blood samples or apheresis product from a subject at a time period prior to when the expanded cells as described herein might be needed. As such, the source of the cells to be expanded can be collected at any time point necessary, and desired cells, such as immune effector cells, e.g., T cells or NK cells, isolated and frozen for later use in cell therapy, e.g., T cell therapy, for any number of diseases or conditions that would benefit from cell therapy, e.g., T cell therapy, such as those described herein. In one aspect a blood sample or an apheresis is taken from a generally healthy subject. In certain aspects, a blood sample or an apheresis is taken from a generally healthy subject who is at risk of developing a disease, but who has not yet developed a disease, and the cells of interest are isolated and frozen for later use. In certain aspects, the immune effector cells (e.g., T cells or NK cells) may be expanded, frozen, and used at a later time. In certain aspects, samples are collected from a patient shortly after diagnosis of a particular disease as described herein but prior to any treatments. In a further aspect, the cells are isolated from a blood sample or an apheresis from a subject prior to any number of relevant treatment modalities, including but not limited to treatment with agents such as natalizumab, efalizumab, antiviral agents, chemotherapy, radiation, immunosuppressive agents, such as cyclosporin, azathioprine, methotrexate, mycophenolate, and FK506, antibodies, or other immunoablative agents such as CAMPATH, anti-CD3 antibodies, cytoxan, fludarabine, cyclosporin, FK506, rapamycin, mycophenolic acid, steroids, FR901228, and irradiation.

[0660] In a further aspect of the present invention, T cells are obtained from a patient directly following treatment that leaves the subject with functional T cells. In this regard, it has been observed that following certain cancer treatments, in particular treatments with drugs that damage the immune system, shortly after treatment during the period when patients would normally be recovering from the treatment, the quality of T cells obtained may be optimal or improved for their ability to expand ex vivo. Likewise, following ex vivo manipulation using the methods described herein, these cells may be in a preferred state for enhanced engraftment and in vivo expansion. Thus, it is contemplated within the context of the present invention to collect blood cells, including T cells, dendritic cells, or other cells of the hematopoietic lineage, during this recovery phase. Further, in certain aspects, mobilization (for example, mobilization with GM-CSF) and conditioning regimens can be used to create a condition in a subject wherein repopulation, recirculation, regeneration, and/or expansion of particular cell types is favored, especially during a defined window of time following therapy. Illustrative cell types include T cells, B cells, dendritic cells, and other cells of the immune system.

[0661] In one embodiment, the immune effector cells expressing a CAR molecule, e.g., a CAR molecule described herein, are obtained from a subject that has received a low, immune enhancing dose of an mTOR inhibitor. In an embodiment, the population of immune effector cells, e.g., T cells, to be engineered to express a CAR, are harvested after a sufficient time, or after sufficient dosing of the low, immune enhancing, dose of an mTOR inhibitor, such that the level of PD1 negative immune effector cells, e.g., T cells, or the ratio of PD1 negative immune effector cells, e.g., T cells/PD1 positive immune effector cells, e.g., T cells, in the subject or harvested from the subject has been, at least transiently, increased.

[0662] In other embodiments, population of immune effector cells, e.g., T cells, which have, or will be engineered to express a CAR, can be treated ex vivo by contact with an amount of an mTOR inhibitor that increases the number of PD1 negative immune effector cells, e.g., T cells or increases the ratio of PD1 negative immune effector cells, e.g., T cells/PD1 positive immune effector cells, e.g., T cells.

[0663] In one embodiment, a T cell population is diaglycerol kinase (DGK)-deficient. DGK-deficient cells include cells that do not express DGK RNA or protein, or have reduced or inhibited DGK activity. DGK-deficient cells can be generated by genetic approaches, e.g., administering RNA-interfering agents, e.g., siRNA, shRNA, miRNA, to reduce or prevent DGK expression. Alternatively, DGK-deficient cells can be generated by treatment with DGK inhibitors described herein.

[0664] In one embodiment, a T cell population is Ikaros-deficient. Ikaros-deficient cells include cells that do not express Ikaros RNA or protein, or have reduced or inhibited Ikaros activity, Ikaros-deficient cells can be generated by genetic approaches, e.g., administering RNA-interfering agents, e.g., siRNA, shRNA, miRNA, to reduce or prevent Ikaros expression. Alternatively, Ikaros-deficient cells can be generated by treatment with Ikaros inhibitors, e.g., lenalidomide.

[0665] In embodiments, a T cell population is DGK-deficient and Ikaros-deficient, e.g., does not express DGK and Ikaros, or has reduced or inhibited DGK and Ikaros activity. Such DGK and Ikaros-deficient cells can be generated by any of the methods described herein.

[0666] In an embodiment, the NK cells are obtained from the subject. In another embodiment, the NK cells are an NK cell line, e.g., NK-92 cell line (Conkwest).

[0667] Modifications of CAR Cells, Including Allogeneic CAR Cells

[0668] In embodiments described herein, the immune effector cell can be an allogeneic immune effector cell, e.g., T cell or NK cell. For example, the cell can be an allogeneic T cell, e.g., an allogeneic T cell lacking expression of a functional T cell receptor (TCR) and/or human leukocyte antigen (HLA), e.g., HLA class I and/or HLA class II, and/or beta-2 microglobulin (β₂m). Compositions of allogeneic CAR and methods thereof have been described in, e.g., pages 227-237 of WO 2016/014565, incorporated herein by reference in its entirety.

[0669] In some embodiments, a cell, e.g., a T cell or a NK cell, is modified to reduce the expression of a TCR, and/or HLA, and/or β₂m, and/or an inhibitory molecule described herein (e.g., PD1, PD-L1, PD-L2, CTLA4, TIM3, CEACAM (e.g., CEACAM-1, CEACAM-3 and/or CEACAM-5), LAG3, VISTA, BTLA, TIGIT, LAIR1, CD160, 2B4, CD80, CD86, B7-H3 (CD276), B7-H4 (VTCN1), HVEM (TNFRSF14 or CD270), KIR, A2aR, MHC class I, MHC class II, GALS, adenosine, and TGFR beta), using, e.g., a method described herein, e.g., siRNA, shRNA, clustered regularly interspaced short palindromic repeats (CRISPR) transcription-activator like effector nuclease (TALEN), or zinc finger endonuclease (ZFN).

[0670] In some embodiments, a cell, e.g., a T cell or a NK cell is engineered to express a telomerase subunit, e.g., the catalytic subunit of telomerase, e.g., TERT, e.g., hTERT. In one embodiment, such modification improves persistence of the cell in a patient.

### Activation and Expansion of T Cells

[0671] T cells may be activated and expanded generally using methods as described, for example, in U.S. Pat. Nos. 6,352,694; 6,534,055; 6,905,680; 6,692,964; 5,858,358; 6,887,466; 6,905,681; 7,144,575; 7,067,318; 7,172,869; 7,232,566; 7,175,843; 5,883,223; 6,905,874; 6,797,514; 6,867,041; and U.S. Patent Application Publication No. 20060121005.

[0672] Generally, the T cells of the invention may be expanded by contact with a surface having attached thereto an agent that stimulates a CD3/TCR complex associated signal and a ligand that stimulates a costimulatory molecule on the surface of the T cells. In particular, T cell populations may be stimulated as described herein, such as by contact with an anti-CD3 antibody, or antigen-binding fragment thereof, or an anti-CD2 antibody immobilized on a surface, or by contact with a protein kinase C activator (e.g., bryostatin) in conjunction with a calcium ionophore. For co-stimulation of an accessory molecule on the surface of the T cells, a ligand that binds the accessory molecule is used. For example, a population of T cells can be contacted with an anti-CD3 antibody and an anti-CD28 antibody, under conditions appropriate for stimulating proliferation of the T cells. To stimulate proliferation of either CD4+ T cells or CD8+ T cells, an anti-CD3 antibody and an anti-CD28 antibody can be used. Examples of an anti-CD28 antibody include 9.3, B-T3, XR-CD28 (Diaclone, Besancon, France) can be used as can other methods commonly known in the art (Berg et al., Transplant Proc. 30(8):3975-3977, 1998; Haanen et al., J. Exp. Med. 190(9):13191328, 1999; Garland et al., J. Immunol Meth. 227(1-2):53-63, 1999).

[0673] In certain aspects, the primary stimulatory signal and the costimulatory signal for the T cell may be provided by different protocols. For example, the agents providing each signal may be in solution or coupled to a surface. When coupled to a surface, the agents may be coupled to the same surface (i.e., in “cis” formation) or to separate surfaces (i.e., in “trans” formation). Alternatively, one agent may be coupled to a surface and the other agent in solution. In one aspect, the agent providing the costimulatory signal is bound to a cell surface and the agent providing the primary activation signal is in solution or coupled to a surface. In certain aspects, both agents can be in solution. In one aspect, the agents may be in soluble form, and then cross-linked to a surface, such as a cell expressing Fc receptors or an antibody or other binding agent which will bind to the agents. In this regard, see for example, U.S. Patent Application Publication Nos. 20040101519 and 20060034810 for artificial antigen presenting cells (aAPCs) that are contemplated for use in activating and expanding T cells in the present invention.

[0674] In one aspect, the two agents are immobilized on beads, either on the same bead, i.e., “cis,” or to separate beads, i.e., “trans.” By way of example, the agent providing the primary activation signal is an anti-CD3 antibody or an antigen-binding fragment thereof and the agent providing the costimulatory signal is an anti-CD28 antibody or antigen-binding fragment thereof; and both agents are co-immobilized to the same bead in equivalent molecular amounts. In one aspect, a 1:1 ratio of each antibody bound to the beads for CD4+ T cell expansion and T cell growth is used. In certain aspects of the present invention, a ratio of anti CD3:CD28 antibodies bound to the beads is used such that an increase in T cell expansion is observed as compared to the expansion observed using a ratio of 1:1. In one particular aspect an increase of from about 1 to about 3 fold is observed as compared to the expansion observed using a ratio of 1:1. In one aspect, the ratio of CD3:CD28 antibody bound to the beads ranges from 100:1 to 1:100 and all integer values there between. In one aspect of the present invention, more anti-CD28 antibody is bound to the particles than anti-CD3 antibody, i.e., the ratio of CD3:CD28 is less than one. In certain aspects of the invention, the ratio of anti CD28 antibody to anti CD3 antibody bound to the beads is greater than 2:1. In one particular aspect, a 1:100 CD3:CD28 ratio of antibody bound to beads is used. In one aspect, a 1:75 CD3:CD28 ratio of antibody bound to beads is used. In a further aspect, a 1:50 CD3:CD28 ratio of antibody bound to beads is used. In one aspect, a 1:30 CD3:CD28 ratio of antibody bound to beads is used. In one preferred aspect, a 1:10 CD3:CD28 ratio of antibody bound to beads is used. In one aspect, a 1:3 CD3:CD28 ratio of antibody bound to the beads is used. In yet one aspect, a 3:1 CD3:CD28 ratio of antibody bound to the beads is used.

[0675] Ratios of particles to cells from 1:500 to 500:1 and any integer values in between may be used to stimulate T cells or other target cells. As those of ordinary skill in the art can readily appreciate, the ratio of particles to cells may depend on particle size relative to the target cell. For example, small sized beads could only bind a few cells, while larger beads could bind many. In certain aspects the ratio of cells to particles ranges from 1:100 to 100:1 and any integer values in-between and in further aspects the ratio comprises 1:9 to 9:1 and any integer values in between, can also be used to stimulate T cells. The ratio of anti-CD3- and anti-CD28-coupled particles to T cells that result in T cell stimulation can vary as noted above, however certain preferred values include 1:100, 1:50, 1:40, 1:30, 1:20, 1:10, 1:9, 1:8, 1:7, 1:6, 1:5, 1:4, 1:3, 1:2, 1:1, 2:1, 3:1, 4:1, 5:1, 6:1, 7:1, 8:1, 9:1, 10:1, and 15:1 with one preferred ratio being at least 1:1 particles per T cell. In one aspect, a ratio of particles to cells of 1:1 or less is used. In one particular aspect, a preferred particle: cell ratio is 1:5. In further aspects, the ratio of particles to cells can be varied depending on the day of stimulation. For example, in one aspect, the ratio of particles to cells is from 1:1 to 10:1 on the first day and additional particles are added to the cells every day or every other day thereafter for up to 10 days, at final ratios of from 1:1 to 1:10 (based on cell counts on the day of addition). In one particular aspect, the ratio of particles to cells is 1:1 on the first day of stimulation and adjusted to 1:5 on the third and fifth days of stimulation. In one aspect, particles are added on a daily or every other day basis to a final ratio of 1:1 on the first day, and 1:5 on the third and fifth days of stimulation. In one aspect, the ratio of particles to cells is 2:1 on the first day of stimulation and adjusted to 1:10 on the third and fifth days of stimulation. In one aspect, particles are added on a daily or every other day basis to a final ratio of 1:1 on the first day, and 1:10 on the third and fifth days of stimulation. One of skill in the art will appreciate that a variety of other ratios may be suitable for use in the present invention. In particular, ratios will vary depending on particle size and on cell size and type. In one aspect, the most typical ratios for use are in the neighborhood of 1:1, 2:1 and 3:1 on the first day.

[0676] In further aspects of the present invention, the cells, such as T cells, are combined with agent-coated beads, the beads and the cells are subsequently separated, and then the cells are cultured. In an alternative aspect, prior to culture, the agent-coated beads and cells are not separated but are cultured together. In a further aspect, the beads and cells are first concentrated by application of a force, such as a magnetic force, resulting in increased ligation of cell surface markers, thereby inducing cell stimulation.

[0677] By way of example, cell surface proteins may be ligated by allowing paramagnetic beads to which anti-CD3 and anti-CD28 are attached (3×28 beads) to contact the T cells. In one aspect the cells (for example, 10⁴ to 10⁹ T cells) and beads (for example, DYNABEADS® M-450 CD3/CD28 T paramagnetic beads at a ratio of 1:1) are combined in a buffer, for example PBS (without divalent cations such as, calcium and magnesium). Again, those of ordinary skill in the art can readily appreciate any cell concentration may be used. For example, the target cell may be very rare in the sample and comprise only 0.01% of the sample or the entire sample (i.e., 100%) may comprise the target cell of interest. Accordingly, any cell number is within the context of the present invention. In certain aspects, it may be desirable to significantly decrease the volume in which particles and cells are mixed together (i.e., increase the concentration of cells), to ensure maximum contact of cells and particles. For example, in one aspect, a concentration of about 10 billion cells/ml, 9 billion/ml, 8 billion/ml, 7 billion/ml, 6 billion/ml, 5 billion/ml, or 2 billion cells/ml is used. In one aspect, greater than 100 million cells/ml is used. In a further aspect, a concentration of cells of 10, 15, 20, 25, 30, 35, 40, 45, or 50 million cells/ml is used. In yet one aspect, a concentration of cells from 75, 80, 85, 90, 95, or 100 million cells/ml is used. In further aspects, concentrations of 125 or 150 million cells/ml can be used. Using high concentrations can result in increased cell yield, cell activation, and cell expansion. Further, use of high cell concentrations allows more efficient capture of cells that may weakly express target antigens of interest, such as CD28-negative T cells. Such populations of cells may have therapeutic value and would be desirable to obtain in certain aspects. For example, using high concentration of cells allows more efficient selection of CD8+ T cells that normally have weaker CD28 expression.

[0678] In one embodiment, cells transduced with a nucleic acid encoding a CAR, e.g., a CAR described herein, are expanded, e.g., by a method described herein. In one embodiment, the cells are expanded in culture for a period of several hours (e.g., about 2, 3, 4, 5, 6, 7, 8, 9, 10, 15, 18, 21 hours) to about 14 days (e.g., 1, 2, 3, 4, 5, 6, 7, 8, 9, 10, 11, 12, 13 or 14 days). In one embodiment, the cells are expanded for a period of 4 to 9 days. In one embodiment, the cells are expanded for a period of 8 days or less, e.g., 7, 6 or 5 days. In one embodiment, the cells, e.g., a BCMA CAR cell described herein, are expanded in culture for 5 days, and the resulting cells are more potent than the same cells expanded in culture for 9 days under the same culture conditions. Potency can be defined, e.g., by various T cell functions, e.g. proliferation, target cell killing, cytokine production, activation, migration, or combinations thereof. In one embodiment, the cells, e.g., a BCMA CAR cell described herein, expanded for 5 days show at least a one, two, three or four fold increase in cells doublings upon antigen stimulation as compared to the same cells expanded in culture for 9 days under the same culture conditions. In one embodiment, the cells, e.g., the cells expressing a BCMA CAR described herein, are expanded in culture for 5 days, and the resulting cells exhibit higher proinflammatory cytokine production, e.g., IFN-γ and/or GM-CSF levels, as compared to the same cells expanded in culture for 9 days under the same culture conditions. In one embodiment, the cells, e.g., a BCMA CAR cell described herein, expanded for 5 days show at least a one, two, three, four, five, ten fold or more increase in pg/ml of proinflammatory cytokine production, e.g., IFN-γ and/or GM-CSF levels, as compared to the same cells expanded in culture for 9 days under the same culture conditions.

[0679] In one aspect of the present invention, the mixture may be cultured for several hours (about 3 hours) to about 14 days or any hourly integer value in between. In one aspect, the mixture may be cultured for 21 days. In one aspect of the invention the beads and the T cells are cultured together for about eight days. In one aspect, the beads and T cells are cultured together for 2-3 days. Several cycles of stimulation may also be desired such that culture time of T cells can be 60 days or more. Conditions appropriate for T cell culture include an appropriate media (e.g., Minimal Essential Media or RPMI Media 1640 or, X-vivo 15, (Lonza)) that may contain factors necessary for proliferation and viability, including serum (e.g., fetal bovine or human serum), interleukin-2 (IL-2), insulin, IFN-γ, IL-4, IL-7, GM-CSF, IL-10, IL-12, IL-15, TGFβ, and TNF-α or any other additives for the growth of cells known to the skilled artisan. Other additives for the growth of cells include, but are not limited to, surfactant, plasmanate, and reducing agents such as N-acetyl-cysteine and 2-mercaptoethanol. Media can include RPMI 1640, AIM-V, DMEM, MEM, α-MEM, F-12, X-Vivo 15, and X-Vivo 20, Optimizer, with added amino acids, sodium pyruvate, and vitamins, either serum-free or supplemented with an appropriate amount of serum (or plasma) or a defined set of hormones, and/or an amount of cytokine(s) sufficient for the growth and expansion of T cells. Antibiotics, e.g., penicillin and streptomycin, are included only in experimental cultures, not in cultures of cells that are to be infused into a subject. The target cells are maintained under conditions necessary to support growth, for example, an appropriate temperature (e.g., 37° C.) and atmosphere (e.g., air plus 5% CO₂).

[0680] In one embodiment, the cells are expanded in an appropriate media (e.g., media described herein) that includes one or more interleukin that result in at least a 200-fold (e.g., 200-fold, 250-fold, 300-fold, 350-fold) increase in cells over a 14 day expansion period, e.g., as measured by a method described herein such as flow cytometry. In one embodiment, the cells are expanded in the presence of IL-15 and/or IL-7 (e.g., IL-15 and IL-7).

[0681] In embodiments, methods described herein, e.g., CAR-expressing cell manufacturing methods, comprise removing T regulatory cells, e.g., CD25+ T cells, from a cell population, e.g., using an anti-CD25 antibody, or fragment thereof, or a CD25-binding ligand, IL-2. Methods of removing T regulatory cells, e.g., CD25+ T cells, from a cell population are described herein. In embodiments, the methods, e.g., manufacturing methods, further comprise contacting a cell population (e.g., a cell population in which T regulatory cells, such as CD25+ T cells, have been depleted; or a cell population that has previously contacted an anti-CD25 antibody, fragment thereof, or CD25-binding ligand) with IL-15 and/or IL-7. For example, the cell population (e.g., that has previously contacted an anti-CD25 antibody, fragment thereof, or CD25-binding ligand) is expanded in the presence of IL-15 and/or IL-7.

[0682] In some embodiments a CAR-expressing cell described herein is contacted with a composition comprising a interleukin-15 (IL-15) polypeptide, a interleukin-15 receptor alpha (IL-15Ra) polypeptide, or a combination of both a IL-15 polypeptide and a IL-15Ra polypeptide e.g., hetIL-15, during the manufacturing of the CAR-expressing cell, e.g., ex vivo. In embodiments, a CAR-expressing cell described herein is contacted with a composition comprising a IL-15 polypeptide during the manufacturing of the CAR-expressing cell, e.g., ex vivo. In embodiments, a CAR-expressing cell described herein is contacted with a composition comprising a combination of both a IL-15 polypeptide and a IL-15 Ra polypeptide during the manufacturing of the CAR-expressing cell, e.g., ex vivo. In embodiments, a CAR-expressing cell described herein is contacted with a composition comprising hetIL-15 during the manufacturing of the CAR-expressing cell, e.g., ex vivo.

[0683] In one embodiment the CAR-expressing cell described herein is contacted with a composition comprising hetIL-15 during ex vivo expansion. In an embodiment, the CAR-expressing cell described herein is contacted with a composition comprising an IL-15 polypeptide during ex vivo expansion. In an embodiment, the CAR-expressing cell described herein is contacted with a composition comprising both an IL-15 polypeptide and an IL-15Ra polypeptide during ex vivo expansion. In one embodiment the contacting results in the survival and proliferation of a lymphocyte subpopulation, e.g., CD8+ T cells.

[0684] T cells that have been exposed to varied stimulation times may exhibit different characteristics. For example, typical blood or apheresed peripheral blood mononuclear cell products have a helper T cell population (TH, CD4+) that is greater than the cytotoxic or suppressor T cell population. Ex vivo expansion of T cells by stimulating CD3 and CD28 receptors produces a population of T cells that prior to about days 8-9 consists predominately of TH cells, while after about days 8-9, the population of T cells comprises an increasingly greater population of TC cells. Accordingly, depending on the purpose of treatment, infusing a subject with a T cell population comprising predominately of TH cells may be advantageous. Similarly, if an antigen-specific subset of TC cells has been isolated it may be beneficial to expand this subset to a greater degree.

[0685] Further, in addition to CD4 and CD8 markers, other phenotypic markers vary significantly, but in large part, reproducibly during the course of the cell expansion process. Thus, such reproducibility enables the ability to tailor an activated T cell product for specific purposes.

[0686] Once a BCMA CAR is constructed, various assays can be used to evaluate the activity of the molecule, such as but not limited to, the ability to expand T cells following antigen stimulation, sustain T cell expansion in the absence of re-stimulation, and anti-cancer activities in appropriate in vitro and animal models. Assays to evaluate the effects of a BCMA CAR are described in further detail below

[0687] Western blot analysis of CAR expression in primary T cells can be used to detect the presence of monomers and dimers. See, e.g., Milone et al., Molecular Therapy 17(8): 1453-1464 (2009). Very briefly, T cells (1:1 mixture of CD4⁺ and CD8⁺ T cells) expressing the CARs are expanded in vitro for more than 10 days followed by lysis and SDS-PAGE under reducing conditions. CARs containing the full length TCR-ζ cytoplasmic domain and the endogenous TCR-ζ chain are detected by western blotting using an antibody to the TCR-chain. The same T cell subsets are used for SDS-PAGE analysis under non-reducing conditions to permit evaluation of covalent dimer formation.

[0688] In vitro expansion of CAR⁺ T cells following antigen stimulation can be measured by flow cytometry. For example, a mixture of CD4⁺ and CD8⁺ T cells are stimulated with aCD3/aCD28 aAPCs followed by transduction with lentiviral vectors expressing GFP under the control of the promoters to be analyzed. Exemplary promoters include the CMV IE gene, EF-1α, ubiquitin C, or phosphoglycerokinase (PGK) promoters. GFP fluorescence is evaluated on day 6 of culture in the CD4⁺ and/or CD8⁺ T cell subsets by flow cytometry. See, e.g., Milone et al., Molecular Therapy 17(8): 1453-1464 (2009). Alternatively, a mixture of CD4⁺ and CD8⁺ T cells are stimulated with aCD3/aCD28 coated magnetic beads on day 0, and transduced with CAR on day 1 using a bicistronic lentiviral vector expressing CAR along with eGFP using a 2A ribosomal skipping sequence. Cultures are re-stimulated with BCMA-expressing cells, such as multiple myeloma cell lines or K562-BCMA, following washing. Exogenous IL-2 is added to the cultures every other day at 100 IU/ml. GFP⁺ T cells are enumerated by flow cytometry using bead-based counting. See, e.g., Milone et al., Molecular Therapy 17(8): 1453-1464 (2009).

[0689] Sustained CAR⁺ T cell expansion in the absence of re-stimulation can also be measured. See, e.g., Milone et al., Molecular Therapy 17(8): 1453-1464 (2009). Briefly, mean T cell volume (fl) is measured on day 8 of culture using a Coulter Multisizer III particle counter, a Nexcelom Cellometer Vision or Millipore Scepter, following stimulation with aCD3/aCD28 coated magnetic beads on day 0, and transduction with the indicated CAR on day 1.

[0690] Animal models can also be used to measure a CART activity. For example, xenograft model using human BCMA-specific CAR⁺ T cells to treat a primary human multiple myeloma in immunodeficient mice can be used. See, e.g., Milone et al., Molecular Therapy 17(8): 1453-1464 (2009). Very briefly, after establishment of MM, mice are randomized as to treatment groups. Different numbers of BCMA CART cells can be injected into immunodeficient mice bearing MM. Animals are assessed for disease progression and tumor burden at weekly intervals. Survival curves for the groups are compared using the log-rank test. In addition, absolute peripheral blood CD4⁺ and CD8⁺ T cell counts 4 weeks following T cell injection in the immunodeficient mice can also be analyzed. Mice are injected with multiple myeloma cells and 3 weeks later are injected with T cells engineered to express BCMA CAR, e.g., by a bicistronic lentiviral vector that encodes the CAR linked to eGFP. T cells are normalized to 45-50% input GFP⁺ T cells by mixing with mock-transduced cells prior to injection, and confirmed by flow cytometry. Animals are assessed for leukemia at 1-week intervals. Survival curves for the CAR⁺ T cell groups are compared using the log-rank test.

[0691] Assessment of cell proliferation and cytokine production has been previously described, e.g., at Milone et al., Molecular Therapy 17(8): 1453-1464 (2009). Briefly, assessment of CAR-mediated proliferation is performed in microtiter plates by mixing washed T cells with K562 cells expressing BCMA or other BCMA-expressing myeloma cells are irradiated with gamma-radiation prior to use. Anti-CD3 (clone OKT3) and anti-CD28 (clone 9.3) monoclonal antibodies are added to cultures with KT32-BBL cells to serve as a positive control for stimulating T-cell proliferation since these signals support long-term CD8⁺ T cell expansion ex vivo. T cells are enumerated in cultures using CountBright™ fluorescent beads (Invitrogen, Carlsbad, Calif.) and flow cytometry as described by the manufacturer. CAR⁺ T cells are identified by GFP expression using T cells that are engineered with eGFP-2A linked CAR-expressing lentiviral vectors. For CAR+ T cells not expressing GFP, the CAR+ T cells are detected with biotinylated recombinant BCMA protein and a secondary avidin-PE conjugate. CD4+ and CD8⁺ expression on T cells are also simultaneously detected with specific monoclonal antibodies (BD Biosciences). Cytokine measurements are performed on supernatants collected 24 hours following re-stimulation using the human TH1/TH2 cytokine cytometric bead array kit (BD Biosciences, San Diego, Calif.) according the manufacturer's instructions. Fluorescence is assessed using a FACScalibur flow cytometer, and data is analyzed according to the manufacturer's instructions.

[0692] Cytotoxicity can be assessed by a standard 51Cr-release assay. See, e.g., Milone et al., Molecular Therapy 17(8): 1453-1464 (2009). Briefly, target cells (e.g., K562 lines expressing BCMA and primary multiple myeloma cells) are loaded with 51Cr (as NaCrO4, New England Nuclear, Boston, Mass.) at 37° C. for 2 hours with frequent agitation, washed twice in complete RPMI and plated into microtiter plates. Effector T cells are mixed with target cells in the wells in complete RPMI at varying ratios of effector cell:target cell (E:T). Additional wells containing media only (spontaneous release, SR) or a 1% solution of triton-X 100 detergent (total release, TR) are also prepared. After 4 hours of incubation at 37° C., supernatant from each well is harvested. Released 51Cr is then measured using a gamma particle counter (Packard Instrument Co., Waltham, Mass.). Each condition is performed in at least triplicate, and the percentage of lysis is calculated using the formula: % Lysis=(ER−SR)/(TR−SR), where ER represents the average 51Cr released for each experimental condition. Alternatively, cytotoxicity can also be assessed using a Bright-Glo™ Luciferase Assay.

[0693] Imaging technologies can be used to evaluate specific trafficking and proliferation of CARs in tumor-bearing animal models. Such assays have been described, for example, in Barrett et al., Human Gene Therapy 22:1575-1586 (2011). Briefly, NOD/SCID/yc^{-/-} (NSG) mice or other immunodeficient are injected IV with multiple myeloma cells followed 7 days later with BCMA CART cells 4 hour after electroporation with the CAR constructs. The T cells are stably transfected with a lentiviral construct to express firefly luciferase, and mice are imaged for bioluminescence. Alternatively, therapeutic efficacy and specificity of a single injection of CAR⁺ T cells in a multiple myeloma xenograft model can be measured as the following: NSG mice are injected with multiple myeloma cells transduced to stably express firefly luciferase, followed by a single tail-vein injection of T cells electroporated with BCMA CAR construct days later. Animals are imaged at various time points post injection. For example, photon-density heat maps of firefly luciferasepositive tumors in representative mice at day 5 (2 days before treatment) and day 8 (24 hr post CAR⁺ PBLs) can be generated.

[0694] Alternatively, or in combination to the methods disclosed herein, methods and compositions for one or more of: detection and/or quantification of CAR-expressing cells (e.g., in vitro or in vivo (e.g., clinical monitoring)); immune cell expansion and/or activation; and/or CAR-specific selection, that involve the use of a CAR ligand, are disclosed. In one exemplary embodiment, the CAR ligand is an antibody that binds to the CAR molecule, e.g., binds to the extracellular antigen binding domain of CAR (e.g., an antibody that binds to the antigen binding domain, e.g., an anti-idiotypic antibody; or an antibody that binds to a constant region of the extracellular binding domain) In other embodiments, the CAR ligand is a CAR antigen molecule (e.g., a CAR antigen molecule as described herein).

[0695] In one aspect, a method for detecting and/or quantifying CAR-expressing cells is disclosed. For example, the CAR ligand can be used to detect and/or quantify CAR-expressing cells in vitro or in vivo (e.g., clinical monitoring of CAR-expressing cells in a patient, or dosing a patient). The method includes:

[0696] providing the CAR ligand (optionally, a labelled CAR ligand, e.g., a CAR ligand that includes a tag, a bead, a radioactive or fluorescent label);

[0697] acquiring the CAR-expressing cell (e.g., acquiring a sample containing CAR-expressing cells, such as a manufacturing sample or a clinical sample);

[0698] contacting the CAR-expressing cell with the CAR ligand under conditions where binding occurs, thereby detecting the level (e.g., amount) of the CAR-expressing cells present. Binding of the CAR-expressing cell with the CAR ligand can be detected using standard techniques such as FACS, ELISA and the like.

[0699] In another aspect, a method of expanding and/or activating cells (e.g., immune effector cells) is disclosed. The method includes:

[0700] providing a CAR-expressing cell (e.g., a first CAR-expressing cell or a transiently expressing CAR cell);

[0701] contacting said CAR-expressing cell with a CAR ligand, e.g., a CAR ligand as described herein), under conditions where immune cell expansion and/or proliferation occurs, thereby producing the activated and/or expanded cell population.

[0702] In certain embodiments, the CAR ligand is present on (e.g., is immobilized or attached to a substrate, e.g., a non-naturally occurring substrate). In some embodiments, the substrate is a non-cellular substrate. The non-cellular substrate can be a solid support chosen from, e.g., a plate (e.g., a microtiter plate), a membrane (e.g., a nitrocellulose membrane), a matrix, a chip or a bead. In embodiments, the CAR ligand is present in the substrate (e.g., on the substrate surface). The CAR ligand can be immobilized, attached, or associated covalently or non-covalently (e.g., cross-linked) to the substrate. In one embodiment, the CAR ligand is attached (e.g., covalently attached) to a bead. In the aforesaid embodiments, the immune cell population can be expanded in vitro or ex vivo. The method can further include culturing the population of immune cells in the presence of the ligand of the CAR molecule, e.g., using any of the methods described herein.

[0703] In other embodiments, the method of expanding and/or activating the cells further comprises addition of a second stimulatory molecule, e.g., CD28. For example, the CAR ligand and the second stimulatory molecule can be immobilized to a substrate, e.g., one or more beads, thereby providing increased cell expansion and/or activation.

[0704] In yet another aspect, a method for selecting or enriching for a CAR expressing cell is provided. The method includes contacting the CAR expressing cell with a CAR ligand as described herein; and selecting the cell on the basis of binding of the CAR ligand.

[0705] In yet other embodiments, a method for depleting, reducing and/or killing a CAR expressing cell is provided. The method includes contacting the CAR expressing cell with a CAR ligand as described herein; and targeting the cell on the basis of binding of the CAR ligand, thereby reducing the number, and/or killing, the CAR-expressing cell. In one embodiment, the CAR ligand is coupled to a toxic agent (e.g., a toxin or a cell ablative drug). In another embodiment, the anti-idiotypic antibody can cause effector cell activity, e.g., ADCC or ADC activities.

[0706] Exemplary anti-CAR antibodies that can be used in the methods disclosed herein are described, e.g., in WO 2014/190273 and by Jena et al., “Chimeric Antigen Receptor (CAR)-Specific Monoclonal Antibody to Detect CD19-Specific T cells in Clinical Trials”, PLOS March 2013 8:3 e57838, the contents of which are incorporated by reference. In one embodiment, the anti-idiotypic antibody molecule recognizes an anti-CD19 antibody molecule, e.g., an anti-CD19 scFv. For instance, the anti-idiotypic antibody molecule can compete for binding with the CD19-specific CAR mAb clone no. 136.20.1 described in Jena et al., PLOS March 2013 8:3 e57838; may have the same CDRs (e.g., one or more of, e.g., all of, VH CDR1, VH CDR2, CH CDR3, VL CDR1, VL CDR2, and VL CDR3, using the Kabat definition, the Chothia definition, or a combination of the Kabat and Chothia definitions) as the CD19-specific CAR mAb clone no. 136.20.1; may have one or more (e.g., 2) variable regions as the CD19-specific CAR mAb clone no. 136.20.1, or may comprise the CD19-specific CAR mAb clone no. 136.20.1. In some embodiments, the anti-idiotypic antibody was made according to a method described in Jena et al. In another embodiment, the anti-idiotypic antibody molecule is an anti-idiotypic antibody molecule described in WO 2014/190273. In some embodiments, the anti-idiotypic antibody molecule has the same CDRs (e.g., one or more of, e.g., all of, VH CDR1, VH CDR2, CH CDR3, VL CDR1, VL CDR2, and VL CDR3) as an antibody molecule of WO 2014/190273 such as 136.20.1; may have one or more (e.g., 2) variable regions of an antibody molecule of WO 2014/190273, or may comprise an antibody molecule of WO 2014/190273 such as 136.20.1. In other embodiments, the anti-CAR antibody binds to a constant region of the extracellular binding domain of the CAR molecule, e.g., as described in WO 2014/190273. In some embodiments, the anti-CAR antibody binds to a constant region of the extracellular binding domain of the CAR molecule, e.g., a heavy chain constant region (e.g., a CH2-CH3 hinge region) or light chain constant region. For instance, in some embodiments the anti-CAR antibody competes for binding with the 2D3 monoclonal antibody described in WO 2014/190273, has the same CDRs (e.g., one or more of, e.g., all of, VH CDR1, VH CDR2, CH CDR3, VL CDR1, VL CDR2, and VL CDR3) as 2D3, or has one or more (e.g., 2) variable regions of 2D3, or comprises 2D3 as described in WO 2014/190273.

[0707] In some aspects and embodiments, the compositions and methods herein are optimized for a specific subset of T cells, e.g., as described in U.S. Ser. No. 62/031,699 filed Jul. 31, 2014, the contents of which are incorporated herein by reference in their entirety. In some embodiments, the optimized subsets of T cells display an enhanced persistence compared to a control T cell, e.g., a T cell of a different type (e.g., CD8⁺ or CD4⁺) expressing the same construct.

[0708] In some embodiments, a CD4⁺ T cell comprises a CAR described herein, which CAR comprises an intracellular signaling domain suitable for (e.g., optimized for, e.g., leading to enhanced persistence in) a CD4⁺ T cell, e.g., an ICOS domain. In some embodiments, a CD8⁺ T cell comprises a CAR described herein, which CAR comprises an intracellular signaling domain suitable for (e.g., optimized for, e.g., leading to enhanced persistence of) a CD8⁺ T cell, e.g., a 4-1BB domain, a CD28 domain, or another costimulatory domain other than an ICOS domain. In some embodiments, the CAR described herein comprises an antigen binding domain described herein, e.g., a CAR comprising an antigen binding domain that targets BCMA, e.g., a CAR of Table 1 or 16).

[0709] In an aspect, described herein is a method of treating a subject, e.g., a subject having cancer. The method includes administering to said subject, an effective amount of:

[0710] 1) a CD4⁺ T cell comprising a CAR (the CAR^{CD4+})

[0711] comprising:

[0712] an antigen binding domain, e.g., an antigen binding domain described herein, e.g., an antigen binding domain that targets BCMA, e.g., an antigen-binding domain of Table 1 or 16;

[0713] a transmembrane domain; and

[0714] an intracellular signaling domain, e.g., a first costimulatory domain, e.g., an ICOS domain; and

[0715] 2) a CD8⁺ T cell comprising a CAR (the CAR^{CD8+}) comprising:

[0716] an antigen binding domain, e.g., an antigen binding domain described herein, e.g., an antigen binding domain that targets BCMA, e.g., an antigen-binding domain of Table 1 or 16;

[0717] a transmembrane domain; and

[0718] an intracellular signaling domain, e.g., a second costimulatory domain, e.g., a 4-1BB domain, a CD28 domain, or another costimulatory domain other than an ICOS domain;

[0719] wherein the CAR^{CD4+} and the CAR^{CD8+} differ from one another.

[0720] Optionally, the method further includes administering:

[0721] 3) a second CD8+ T cell comprising a CAR (the second CAR^{CD8+}) comprising:

[0722] an antigen binding domain, e.g., an antigen binding domain described herein, e.g., an antigen binding domain that specifically binds BCMA, e.g., an antigen-binding domain of Table 1 or 16;

[0723] a transmembrane domain; and

[0724] an intracellular signaling domain, wherein the second CAR^{CD8+} comprises an intracellular signaling domain, e.g., a costimulatory signaling domain, not present on the CAR^{CD8+}, and, optionally, does not comprise an ICOS signaling domain.

[0725] Other assays, including those that are known in the art can also be used to evaluate the BCMA CAR constructs of the invention.

### Therapeutic Application

[0726] BCMA Associated Diseases and/or Disorders

[0727] In one aspect, the invention provides methods for treating a disease associated with BCMA expression. In one aspect, the invention provides methods for treating a disease wherein part of the tumor is negative for BCMA and part of the tumor is positive for BCMA For example, the CAR of the invention is useful for treating subjects that have undergone treatment for a disease associated with elevated expression of BCMA, wherein the subject that has undergone treatment for elevated levels of BCMA exhibits a disease associated with elevated levels of BCMA. In embodiments, the CAR of the invention is useful for treating subjects that have undergone treatment for a disease associated with expression of BCMA, wherein the subject that has undergone treatment related to expression of BCMA exhibits a disease associated with expression of BCMA.

[0728] In one embodiment, the invention provides methods for treating a disease wherein BCMA is expressed on both normal cells and cancers cells, but is expressed at lower levels on normal cells. In one embodiment, the method further comprises selecting a CAR that binds of the invention with an affinity that allows the BCMA CAR to bind and kill the cancer cells expressing BCMA but less than 30%, 25%, 20%, 15%, 10%, 5% or less of the normal cells expressing BCMA are killed, e.g., as determined by an assay described herein. For example, a killing assay such as flow cytometry based on Cr51 CTL can be used. In one embodiment, the BCMA CAR has an antigen binding domain that has a binding affinity KD of 10⁻⁴ M to 10⁻⁸M, e.g., 10⁻⁵ M to 10⁻⁵ M, e.g., 10⁻⁶ M or 10⁻⁷ M, for the target antigen. In one embodiment, the BCMA antigen binding domain has a binding affinity that is at least five-fold, 10-fold, 20-fold, 30-fold, 50-fold, 100-fold or 1,000-fold less than a reference antibody, e.g., an antibody described herein.

[0729] In one aspect, the invention pertains to a vector comprising BCMA CAR operably linked to promoter for expression in mammalian immune effector cells, e.g., T cells or NK cells. In one aspect, the invention provides a recombinant immune effector cell, e.g., T cell or NK cell, expressing the BCMA CAR for use in treating BCMA-expressing tumors, wherein the recombinant immune effector cell (e.g., T cell or NK cell) expressing the BCMA CAR is termed a BCMA CAR-expressing cell (e.g., BCMA CART or BCMA CAR-expressing NK cell). In one aspect, the BCMA CAR-expressing cell (e.g., BCMA CART or BCMA CAR-expressing NK cell) of the invention is capable of contacting a tumor cell with at least one BCMA CAR of the invention expressed on its surface such that the BCMA CAR-expressing cell (e.g., BCMA CART or BCMA CAR-expressing NK cell)targets the tumor cell and growth of the tumor is inhibited.

[0730] In one aspect, the invention pertains to a method of inhibiting growth of a BCMA-expressing tumor cell, comprising contacting the tumor cell with a BCMA CAR-expressing cell (e.g., BCMA CART or BCMA CAR-expressing NK cell) of the present invention such that the BCMA CAR-expressing cell (e.g., BCMA CART or BCMA CAR-expressing NK cell) is activated in response to the antigen and targets the cancer cell, wherein the growth of the tumor is inhibited.

[0731] In one aspect, the invention pertains to a method of treating cancer in a subject. The method comprises administering to the subject a BCMA CAR-expressing cell (e.g., BCMA CART or BCMA CAR-expressing NK cell) of the present invention such that the cancer is treated in the subject. An example of a cancer that is treatable by the BCMA CAR-expressing cell (e.g., BCMA CART or BCMA CAR-expressing NK cell) of the invention is a cancer associated with expression of BCMA.

[0732] The invention includes a type of cellular therapy where immune effector cells (e.g., T cells or NK cells) are genetically modified to express a chimeric antigen receptor (CAR) and the BCMA CAR-expressing cell (e.g., BCMA CART or BCMA CAR-expressing NK cell) is infused to a recipient in need thereof. The infused cell is able to kill tumor cells in the recipient. Unlike antibody therapies, CAR-modified cells, e.g., T cells or NK cells, are able to replicate in vivo resulting in long-term persistence that can lead to sustained tumor control. In various aspects, the cells (e.g., T cells or NK cells) administered to the patient, or their progeny, persist in the patient for at least four months, five months, six months, seven months, eight months, nine months, ten months, eleven months, twelve months, thirteen months, fourteen month, fifteen months, sixteen months, seventeen months, eighteen months, nineteen months, twenty months, twenty-one months, twenty-two months, twenty-three months, two years, three years, four years, or five years after administration of the cell (e.g., T cell or NK cell) to the patient.

[0733] The invention also includes a type of cellular therapy where immune effector cells (e.g., T cells or NK cells) are modified, e.g., by in vitro transcribed RNA, to transiently express a chimeric antigen receptor (CAR) and the immune effector cell (e.g., T cell or NK cell) is infused to a recipient in need thereof. The infused cell is able to kill tumor cells in the recipient. Thus, in various aspects, the immune effector cells (e.g., T cells or NK cells) administered to the patient, is present for less than one month, e.g., three weeks, two weeks, one week, after administration of the immune effector cell (e.g., T cell or NK cell) to the patient.

[0734] Without wishing to be bound by any particular theory, the anti-tumor immunity response elicited by the CAR-modified immune effector cells (e.g., T cells or NK cells) may be an active or a passive immune response, or alternatively may be due to a direct vs indirect immune response. In one aspect, the CAR transduced immune effector cells (e.g., T cells or NK cells) exhibit specific proinflammatory cytokine secretion and potent cytolytic activity in response to human cancer cells expressing the BCMA, resist soluble BCMA inhibition, mediate bystander killing and mediate regression of an established human tumor. For example, antigen-less tumor cells within a heterogeneous field of BCMA-expressing tumor may be susceptible to indirect destruction by BCMA-redirected immune effector cells (e.g., T cells or NK cells) that has previously reacted against adjacent antigen-positive cancer cells.

[0735] In one aspect, the fully-human CAR-modified immune effector cells (e.g., T cells or NK cells) of the invention may be a type of vaccine for ex vivo immunization and/or in vivo therapy in a mammal. In one aspect, the mammal is a human.

[0736] With respect to ex vivo immunization, at least one of the following occurs in vitro prior to administering the cell into a mammal: i) expansion of the cells, ii) introducing a nucleic acid encoding a CAR to the cells or iii) cryopreservation of the cells.

[0737] Ex vivo procedures are well known in the art and are discussed more fully below. Briefly, cells are isolated from a mammal (e.g., a human) and genetically modified (i.e., transduced or transfected in vitro) with a vector expressing a CAR disclosed herein. The CAR-modified cell can be administered to a mammalian recipient to provide a therapeutic benefit. The mammalian recipient may be a human and the CAR-modified cell can be autologous with respect to the recipient. Alternatively, the cells can be allogeneic, syngeneic or xenogeneic with respect to the recipient.

[0738] The procedure for ex vivo expansion of hematopoietic stem and progenitor cells is described in U.S. Pat. No. 5,199,942, incorporated herein by reference, can be applied to the cells of the present invention. Other suitable methods are known in the art, therefore the present invention is not limited to any particular method of ex vivo expansion of the cells. Briefly, ex vivo culture and expansion of T cells comprises: (1) collecting CD34+ hematopoietic stem and progenitor cells from a mammal from peripheral blood harvest or bone marrow explants; and (2) expanding such cells ex vivo. In addition to the cellular growth factors described in U.S. Pat. No. 5,199,942, other factors such as flt3-L, IL-1, IL-3 and c-kit ligand, can be used for culturing and expansion of the cells.

[0739] In addition to using a cell-based vaccine in terms of ex vivo immunization, the present invention also provides compositions and methods for in vivo immunization to elicit an immune response directed against an antigen in a patient.

[0740] Generally, the cells activated and expanded as described herein may be utilized in the treatment and prevention of diseases that arise in individuals who are immunocompromised. In particular, the CAR-modified immune effector cells (e.g., T cells or NK cells) of the invention are used in the treatment of diseases, disorders and conditions associated with expression of BCMA. In certain aspects, the cells of the invention are used in the treatment of patients at risk for developing diseases, disorders and conditions associated with expression of BCMA. Thus, the present invention provides methods for the treatment or prevention of diseases, disorders and conditions associated with expression of BCMA comprising administering to a subject in need thereof, a therapeutically effective amount of the CAR-modified immune effector cells (e.g., T cells or NK cells) of the invention.

[0741] In one aspect the CAR-expressing cells (e.g., CART cells or CAR-expressing NK cells) of the inventions may be used to treat a proliferative disease such as a cancer or malignancy or is a precancerous condition such as a myelodysplasia, a myelodysplastic syndrome or a preleukemia. In one aspect, the cancer is a hematolical cancer. Hematological cancer conditions are the types of cancer such as leukemia and malignant lymphoproliferative conditions that affect blood, bone marrow and the lymphatic system. In one aspect, the hematological cancer is a leukemia or a hematological. An example of a disease or disorder associated with BCMA is multiple myeloma (also known as MM) (See Claudio et al., Blood. 2002, 100(6):2175-86; and Novak et al., Blood. 2004, 103(2):689-94). Multiple myeloma, also known as plasma cell myeloma or Kahler's disease, is a cancer characterized by an accumulation of abnormal or malignant plasma B-cells in the bone marrow. Frequently, the cancer cells invade adjacent bone, destroying skeletal structures and resulting in bone pain and fractures. Most cases of myeloma also features the production of a paraprotein (also known as M proteins or myeloma proteins), which is an abnormal immunoglobulin produced in excess by the clonal proliferation of the malignant plasma cells. Blood serum paraprotein levels of more than 30 g/L is diagnostic of multiple myeloma, according to the diagnostic criteria of the International Myeloma Working Group (IMWG) (See Kyle et al. (2009), Leukemia. 23:3-9). Other symptoms or signs of multiple myeloma include reduced kidney function or renal failure, bone lesions, anemia, hypercalcemia, and neurological symptoms.

[0742] Criteria for distinguishing multiple myeloma from other plasma cell proliferative disorders have been established by the International Myeloma Working Group (See Kyle et al. (2009), Leukemia. 23:3-9). All three of the following criteria must be met:
[0743] Clonal bone marrow plasma cells >10%
[0744] Present of serum and/or urinary monoclonal protein (except in patients with true non-secretory multiple myeloma)
[0745] Evidence of end-organ damage attributable to the underlying plasma cell proliferative disorder, specifically:
   [0746] Hypercalcemia: serum calcium >11.5 mg/100 ml
   [0747] Renal insufficienty: serum creatinine >1.73 mmol/1
   [0748] Anemia: normochromic, normocytic with a hemoglobin value of >2 g/100 ml below the lower limit of normal, or a hemoglobin value <10 g/100 ml
   [0749] Bone lesions: lytic lesions, severe osteopenia, or pathologic fractures.

[0750] Other plasma cell proliferative disorders that can be treated by the compositions and methods described herein include, but are not limited to, asymptomatic myeloma (smoldering multiple myeloma or indolent myeloma), monoclonal gammapathy of undetermined significance (MGUS), Waldenstrom's macroglobulinemia, plasmacytomas (e.g., plasma cell dyscrasia, solitary myeloma, solitary plasmacytoma, extramedullary plasmacytoma, and multiple plasmacytoma), systemic amyloid light chain amyloidosis, and POEMS syndrome (also known as Crow-Fukase syndrome, Takatsuki disease, and PEP syndrome).

[0751] Two staging systems are used in the staging of multiple myeloma: the International Staging System (ISS) (See Greipp et al. (2005), J. Clin. Oncol. 23 (15):3412-3420) and the Dude-Salmon Staging system (DSS) (See Dude et al. (1975), Cancer 36 (3): 842-854). The two staging systems are summarized in the table below:

TABLE 18

| | International Staging System | | Durie-Salmon Staging System | |
|---|---|---|---|---|
| | | Median | | Median |
| Stage | Criteria | survival | Criteria | survival* |
| I | β₂M <3.5 mg/l | 62 | All of the following: | IA: 62 |
| | and serum | months | Hemoglobin level >10 | months |
| | albumin ≥3.5 g/dL | | g/dL | IB: 22 |
| | | | Serum calcium, | months |
| | | | normal or <12 mg/dL | |
| | | | Bone x-ray, normal or | |
| | | | 1 plasmacytoma only | |
| | | | Low monoclonal | |
| | | | protein production | |
| | | | (IgG <5 g/dL, IgA <3 | |
| | | | g/dL, Bence Jones | |
| | | | protein <4 g/dL per | |
| | | | 24 hours | |
| II | Neither stage I | 44 | Neither stage I or | IIA: 58 |
| | or stage III | months | stage III | months |
| | | | | IIB: 354 |
| | | | | months |
| III | β₂M ≥5.5 mg/l | 29 | One or more of the | IIIA: 45 |
| | | months | following: | months |
| | | | Hemogloblin | IIIB: 24 |
| | | | level <8.5 g/dL | months |
| | | | Serum calcium, | |
| | | | normal or >12 mg/dL | |
| | | | Advanced osteolytic | |
| | | | lesions | |
| | | | High monoclonal | |
| | | | protein production | |
| | | | (IgG >7 g/dL, | |
| | | | IgA >5 g/dL, Bence | |
| | | | Jones protein >12 g/dL | |
| | | | per 24 hours | |

*The Durie-Salmon Staging system also includes a subclassification that designates the status of renal function. The designation of “A” or “B” is added after the stage number, wherein “A” indicates relatively normal renal function (serum creatinine value <2.0 mg/dL), and B indicates abnormal renal function (serum creatinine value >2.0 mg/dL).

[0752] Standard treatment for multiple myeloma and associated diseases includes chemotherapy, stem cell transplant (autologous or allogeneic), radiation therapy, and other drug therapies. Frequently used anti-myeloma drugs include alkylating agents (e.g., bendamustine, cyclophosphamide and melphalan), proteasome inhibitors (e.g., bortezomib), corticosteroids (e.g., dexamethasone and prednisone), and immunomodulators (e.g., thalidomide and lenalidomide or Revlimid®), or any combination thereof. Biphosphonate drugs are also frequently administered in combination with the standard anti-MM treatments to prevent bone loss. Patients older than 65-70 years of age are unlikely candidates for stem cell transplant. In some cases, double-autologous stem cell transplants are options for patients less than 60 years of age with suboptimal response to the first transplant. The compositions and methods of the present invention may be administered in combination with any of the currently prescribed treatments for multiple myeloma.

[0753] Another example of a disease or disorder associated with BCMA is Hodgkin's lymphoma and non-Hodgkin's lymphoma (See Chiu et al., Blood. 2007, 109(2):729-39; He et al., J Immunol. 2004, 172(5):3268-79).

[0754] Hodgkin's lymphoma (HL), also known as Hodgkin's disease, is a cancer of the lymphatic system that originates from white blood cells, or lymphocytes. The abnormal cells that comprise the lymphoma are called Reed-Sternberg cells. In Hodgkin's lymphoma, the cancer spreads from one lymph node group to another. Hodgkin's lymphoma can be subclassified into four pathologic subtypes based upon Reed-Sternberg cell morphology and the cell composition around the Reed-Sternberg cells (as determined through lymph node biopsy): nodular sclerosing HL, mixed-cellularity subtype, lymphocyte-rich or lymphocytic predominance, lymphocyte depleted. Some Hodgkin's lymphoma can also be nodular lymphocyte predominant Hodgkin's lymphoma, or can be unspecified. Symptoms and signs of Hodgkin's lymphoma include painless swelling in the lymph nodes in the neck, armpits, or groin, fever, night sweats, weight loss, fatigue, itching, or abdominal pain.

[0755] Non-Hodgkin's lymphoma (NHL) comprises a diverse group of blood cancers that include any kind of lymphoma other than Hodgkin's lymphoma. Subtypes of non-Hodgkin's lymphoma are classified primarily by cell morphology, chromosomal aberrations, and surface markers. NHL subtypes (or NHL-associated cancers) include B cell lymphomas such as, but not limited to, Burkitt's lymphoma, B-cell chronic lymphocytic leukemia (B-CLL), B-cell prolymphocytic leukemia (B-PLL), chronic lymphocytic leukemia (CLL), diffuse large B-cell lymphoma (DLBCL) (e.g., intravascular large B-cell lymphoma and primary mediastinal B-cell lymphoma), follicular lymphoma (e.g., follicle center lymphoma, follicular small cleaved cell), hair cell leukemia, high grade B-cell lymphoma (Burkitt's like), lymphoplasmacytic lymphoma (Waldenstrom's macroglublinemia), mantle cell lymphoma, marginal zone B-cell lymphomas (e.g., extranodal marginal zone B-cell lymphoma or mucosa-associated lymphoid tissue (MALT) lymphoma, nodal marginal zone B-cell lymphoma, and splenic marginal zone B-cell lymphoma), plasmacytoma/myeloma, precursor B-lymphoblastic leukemia/lymphoma (PB-LBL/L), primary central nervous system (CNS) lymphoma, primary intraocular lymphoma, small lymphocytic lymphoma (SLL); and T cell lymphomas, such as, but not limited to, anaplastic large cell lymphoma (ALCL), adult T-cell lymphoma/leukemia (e.g., smoldering, chronic, acute and lymphomatous), angiocentric lymphoma, angioimmunoblastic T-cell lymphoma, cutaneous T-cell lymphomas (e.g., mycosis fungoides, Sezary syndrome, etc.), extranodal natural killer/T-cell lymphoma (nasal-type), enteropathy type intestinal T-cell lymphoma, large granular lymphocyte leukemia, precursor T-lymphoblastic lymphoma/leukemia (T-LBL/L), T-cell chronic lymphocytic leukemia/prolymphocytic leukemia (T-CLL/PLL), and unspecified peripheral T-cell lymphoma. Symptoms and signs of Hodgkin's lymphoma include painless swelling in the lymph nodes in the neck, armpits, or groin, fever, night sweats, weight loss, fatigue, itching, abdominal pain, coughing, or chest pain.

[0756] The staging is the same for both Hodgkin's and non-Hodgkin's lymphoma, and refers to the extent of spread of the cancer cells within the body. In stage I, the lymphoma cells are in one lymph node group. In stage II, lymphoma cells are present in at least two lymph node groups, but both groups are on the same side of the diaphragm, or in one part of a tissue or organ and the lymph nodes near that organ on the same side of the diaphragm. In stage III, lymphoma cells are in lymph nodes on both sides of the diaphragm, or in one part of a tissue or organ near these lymph node groups or in the spleen. In stage IV, lymphoma cells are found in several parts of at least one organ or tissue, or lymphoma cells are in an organ and in lymph nodes on the other side of the diaphragm. In addition to the Roman numeral staging designation, the stages of can also be described by letters A, B, E, and S, wherein A refers to patients without symptoms, B refers to patients with symptoms, E refers to patients in which lymphoma is found in tissues outside the lymph system, and S refers to patients in which lymphoma is found in the spleen.

[0757] Hodgkin's lymphoma is commonly treated with radiation therapy, chemotherapy, or hematopoietic stem cell transplantation. The most common therapy for non-Hodgkin's lymphoma is R-CHOP, which consists of four different chemotherapies (cyclophosphamide, doxorubicin, vincristine, and prenisolone) and rituximab (Rituxan®). Other therapies commonly used to treat NHL include other chemotherapeutic agents, radiation therapy, stem cell transplantation (autologous or allogeneic bone marrow transplantation), or biological therapy, such as immunotherapy. Other examples of biological therapeutic agents include, but are not limited to, rituximab (Rituxan®), tositumomab (Bexxar®), epratuzumab (LymphoCide®), and alemtuzumab (MabCampath®). The compositions and methods of the present invention may be administered in combination with any of the currently prescribed treatments for Hodgkin's lymphoma or non-Hodgkin's lymphoma.

[0758] BCMA expression has also been associated Waldenstrom's macroglobulinemia (WM), also known as lymphoplasmacytic lymphoma (LPL). (See Elsawa et al., Blood. 2006, 107(7):2882-8). Waldenstrom's macroglobulinemia was previously considered to be related to multiple myeloma, but has more recently been classified as a subtype of non-Hodgkin's lymphoma. WM is characterized by uncontrolled B-cell lymphocyte proliferation, resulting in anemia and production of excess amounts of paraprotein, or immunoglobulin M (IgM), which thickens the blood and results in hyperviscosity syndrome. Other symptoms or signs of WM include fever, night sweats, fatigue, anemia, weight loss, lymphadenopathy or splenomegaly, blurred vision, dizziness, nose bleeds, bleeding gums, unusual bruises, renal impairment or failure, amyloidosis, or peripheral neuropathy.

[0759] Standard treatment for WM consists of chemotherapy, specifically with rituximab (Rituxan®). Other chemotherapeutic drugs can be used in combination, such as chlorambucil (Leukeran®), cyclophosphamide (Neosar®), fludarabine (Fludara®), cladribine (Leustatin®), vincristine, and/or thalidomide. Corticosteriods, such as prednisone, can also be administered in combination with the chemotherapy. Plasmapheresis, or plasma exchange, is commonly used throughout treatment of the patient to alleviate some symptoms by removing the paraprotein from the blood. In some cases, stem cell transplantation is an option for some patients.

[0760] Another example of a disease or disorder associated with BCMA is brain cancer. Specifically, expression of BCMA has been associated with astrocytoma or glioblastoma (See Deshayes et al, Oncogene. 2004, 23(17):3005-12, Pelekanou et al., PLoS One. 2013, 8(12):e83250). Astrocytomas are tumors that arise from astrocytes, which are a type of glial cell in the brain. Glioblastoma (also known as glioblastoma multiforme or GBM) is the most malignant form of astrocytoma, and is considered the most advanced stage of brain cancer (stage IV). There are two variants of glioblastoma: giant cell glioblastoma and gliosarcoma. Other astrocytomas include juvenile pilocytic astrocytoma (JPA), fibrillary astrocytoma, pleomorphic xantroastrocytoma (PXA), desembryoplastic neuroepithelial tumor (DNET), and anaplastic astrocytoma (AA).

[0761] Symptoms or signs associated with glioblastoma or astrocytoma include increased pressure in the brain, headaches, seizures, memory loss, changes in behavior, loss in movement or sensation on one side of the body, language dysfunction, cognitive impairments, visual impairment, nausea, vomiting, and weakness in the arms or legs.

[0762] Surgical removal of the tumor (or resection) is the standard treatment for removal of as much of the glioma as possible without damaging or with minimal damage to the normal, surrounding brain. Radiation therapy and/or chemotherapy are often used after surgery to suppress and slow recurrent disease from any remaining cancer cells or satellite lesions. Radiation therapy includes whole brain radiotherapy (conventional external beam radiation), targeted three-dimensional conformal radiotherapy, and targeted radionuclides. Chemotherapeutic agents commonly used to treat glioblastoma include temozolomide, gefitinib or erlotinib, and cisplatin. Angiogenesis inhibitors, such as Bevacizumab (Avastin®), are also commonly used in combination with chemotherapy and/or radiotherapy.

[0763] Supportive treatment is also frequently used to relieve neurological symptoms and improve neurologic function, and is administered in combination any of the cancer therapies described herein. The primary supportive agents include anticonvulsants and corticosteroids. Thus, the compositions and methods of the present invention may be used in combination with any of the standard or supportive treatments to treat a glioblastoma or astrocytoma.

[0764] Non-cancer related diseases and disorders associated with BCMA expression can also be treated by the compositions and methods disclosed herein. Examples of non-cancer related diseases and disorders associated with BCMA expression include, but are not limited to: viral infections; e.g., HIV, fungal invections, e.g., C. neoformans; irritable bowel disease; ulcerative colitis, and disorders related to mucosal immunity.

[0765] The CAR-modified immune effector cells (e.g., T cells or NK cells) of the present invention may be administered either alone, or as a pharmaceutical composition in combination with diluents and/or with other components such as IL-2 or other cytokines or cell populations.

[0766] The present invention provides for compositions and methods for treating cancer. In one aspect, the cancer is a hematologic cancer including but is not limited to hematolical cancer is a leukemia or a lymphoma. In one aspect, the CAR-expressing cells (e.g., CART cells or CAR-expressing NK cells) of the invention may be used to treat cancers and malignancies such as, but not limited to, e.g., acute leukemias including but not limited to, e.g., B-cell acute lymphoid leukemia (“BALL”), T-cell acute lymphoid leukemia (“TALL”), acute lymphoid leukemia (ALL); one or more chronic leukemias including but not limited to, e.g., chronic myelogenous leukemia (CML), chronic lymphocytic leukemia (CLL); additional hematologic cancers or hematologic conditions including, but not limited to, e.g., B cell prolymphocytic leukemia, blastic plasmacytoid dendritic cell neoplasm, Burkitt's lymphoma, diffuse large B cell lymphoma, Follicular lymphoma, Hairy cell leukemia, small cell- or a large cell-follicular lymphoma, malignant lymphoproliferative conditions, MALT lymphoma, mantle cell lymphoma, Marginal zone lymphoma, multiple myeloma, myelodysplasia and myelodysplastic syndrome, non-Hodgkin's lymphoma, plasmablastic lymphoma, plasmacytoid dendritic cell neoplasm, Waldenstrom macroglobulinemia, and “preleukemia” which are a diverse collection of hematological conditions united by ineffective production (or dysplasia) of myeloid blood cells, and the like. Further a disease associated with BCMA expression includes, but not limited to, e.g., atypical and/or non-classical cancers, malignancies, precancerous conditions or proliferative diseases expressing BCMA.

[0767] In embodiments, a composition described herein can be used to treat a disease including but not limited to a plasma cell proliferative disorder, e.g., asymptomatic myeloma (smoldering multiple myeloma or indolent myeloma), monoclonal gammapathy of undetermined significance (MGUS), Waldenstrom's macroglobulinemia, plasmacytomas (e.g., plasma cell dyscrasia, solitary myeloma, solitary plasmacytoma, extramedullary plasmacytoma, and multiple plasmacytoma), systemic amyloid light chain amyloidosis, and POEMS syndrome (also known as Crow-Fukase syndrome, Takatsuki disease, and PEP syndrome).

[0768] In embodiments, a composition described herein can be used to treat a disease including but not limited to a cancer, e.g., a cancer described herein, e.g., a prostate cancer (e.g., castrate-resistant or therapy-resistant prostate cancer, or metastatic prostate cancer), pancreatic cancer, or lung cancer.

[0769] The present invention also provides methods for inhibiting the proliferation or reducing a BCMA-expressing cell population, the methods comprising contacting a population of cells comprising a BMCA-expressing cell with an anti-BCMA CAR-expressing cell (e.g., BCMA CART cell or BCMA CAR-expressing NK cell) of the invention that binds to the BCMA-expressing cell. In a specific aspect, the present invention provides methods for inhibiting the proliferation or reducing the population of cancer cells expressing BCMA, the methods comprising contacting the BCMA-expressing cancer cell population with an anti-BCMA CAR-expressing cell (e.g., BCMA CART cell or BCMA CAR-expressing NK cell) of the invention that binds to the BCMA-expressing cell. In one aspect, the present invention provides methods for inhibiting the proliferation or reducing the population of cancer cells expressing BCMA, the methods comprising contacting the BMCA-expressing cancer cell population with an anti-BCMA CAR-expressing cell (e.g., BCMA CART cell or BCMA CAR-expressing NK cell) of the invention that binds to the BCMA-expressing cell. In certain aspects, the anti-BCMA CAR-expressing cell (e.g., BCMA CART cell or BCMA CAR-expressing NK cell) of the invention reduces the quantity, number, amount or percentage of cells and/or cancer cells by at least 25%, at least 30%, at least 40%, at least 50%, at least 65%, at least 75%, at least 85%, at least 95%, or at least 99% in a subject with or animal model for myeloid leukemia or another cancer associated with BCMA-expressing cells relative to a negative control. In one aspect, the subject is a human.

[0770] The present invention also provides methods for preventing, treating and/or managing a disease associated with BCMA-expressing cells (e.g., a hematologic cancer or atypical cancer expessing BCMA), the methods comprising administering to a subject in need an anti-BCMA CAR-expressing cell (e.g., BCMA CART cell or BCMA CAR-expressing NK cell) of the invention that binds to the BCMA-expressing cell. In one aspect, the subject is a human. Non-limiting examples of disorders associated with BCMA-expressing cells include viral or fungal infections, and disorders related to mucosal immunity.

[0771] The present invention also provides methods for preventing, treating and/or managing a disease associated with BCMA-expressing cells, the methods comprising administering to a subject in need an anti-BCMA CAR-expressing cell (e.g., BCMA CART cell or BCMA CAR-expressing NK cell) of the invention that binds to the BCMA-expressing cell. In one aspect, the subject is a human.

[0772] The present invention provides methods for preventing relapse of cancer associated with BCMA-expressing cells, the methods comprising administering to a subject in need thereof an anti-BCMA CAR-expressing cell (e.g., BCMA CART cell or BCMA CAR-expressing NK cell) of the invention that binds to the BCMA-expressing cell. In one aspect, the methods comprise administering to the subject in need thereof an effective amount of an anti-BCMA CAR-expressing cell (e.g., BCMA CART cell or BCMA CAR-expressing NK cell)described herein that binds to the BCMA-expressing cell in combination with an effective amount of another therapy.

### Combination Therapies

[0773] A CAR-expressing cell described herein may be used in combination with other known agents and therapies. Administered “in combination”, as used herein, means that two (or more) different treatments are delivered to the subject during the course of the subject's affliction with the disorder, e.g., the two or more treatments are delivered after the subject has been diagnosed with the disorder and before the disorder has been cured or eliminated or treatment has ceased for other reasons. In some embodiments, the delivery of one treatment is still occurring when the delivery of the second begins, so that there is overlap in terms of administration. This is sometimes referred to herein as “simultaneous” or “concurrent delivery”. In other embodiments, the delivery of one treatment ends before the delivery of the other treatment begins. In some embodiments of either case, the treatment is more effective because of combined administration. For example, the second treatment is more effective, e.g., an equivalent effect is seen with less of the second treatment, or the second treatment reduces symptoms to a greater extent, than would be seen if the second treatment were administered in the absence of the first treatment, or the analogous situation is seen with the first treatment. In some embodiments, delivery is such that the reduction in a symptom, or other parameter related to the disorder is greater than what would be observed with one treatment delivered in the absence of the other. The effect of the two treatments can be partially additive, wholly additive, or greater than additive. The delivery can be such that an effect of the first treatment delivered is still detectable when the second is delivered.

[0774] A CAR-expressing cell described herein and the at least one additional therapeutic agent can be administered simultaneously, in the same or in separate compositions, or sequentially. For sequential administration, the CAR-expressing cell described herein can be administered first, and the additional agent can be administered second, or the order of administration can be reversed.

[0775] The CAR therapy and/or other therapeutic agents, procedures or modalities can be administered during periods of active disorder, or during a period of remission or less active disease. The CAR therapy can be administered before the other treatment, concurrently with the treatment, post-treatment, or during remission of the disorder.

[0776] When administered in combination, the CAR therapy and the additional agent (e.g., second or third agent), or all, can be administered in an amount or dose that is higher, lower or the same than the amount or dosage of each agent used individually, e.g., as a monotherapy. In certain embodiments, the administered amount or dosage of the CAR therapy, the additional agent (e.g., second or third agent), or all, is lower (e.g., at least 20%, at least 30%, at least 40%, or at least 50%) than the amount or dosage of each agent used individually, e.g., as a monotherapy. In other embodiments, the amount or dosage of the CAR therapy, the additional agent (e.g., second or third agent), or all, that results in a desired effect (e.g., treatment of cancer) is lower (e.g., at least 20%, at least 30%, at least 40%, or at least 50% lower) than the amount or dosage of each agent used individually, e.g., as a monotherapy, required to achieve the same therapeutic effect.

[0777] In further aspects, a CAR-expressing cell described herein may be used in a treatment regimen in combination with surgery, chemotherapy, radiation, immunosuppressive agents, such as cyclosporin, azathioprine, methotrexate, mycophenolate, and FK506, antibodies, or other immunoablative agents such as CAMPATH, anti-CD3 antibodies or other antibody therapies, cytoxin, fludarabine, cyclosporin, FK506, rapamycin, mycophenolic acid, steroids, FR901228, cytokines, and irradiation. peptide vaccine, such as that described in Izumoto et al. 2008 J Neurosurg 108:963-971.

[0778] In certain instances, compounds of the present invention are combined with other therapeutic agents, such as other anti-cancer agents, anti-allergic agents, anti-nausea agents (or anti-emetics), pain relievers, cytoprotective agents, and combinations thereof.

[0779] In one embodiment, a first CAR-expressing cell described herein, e.g., a BCMA CAR-expressing cell described herein, may be used in combination with a second CAR-expressing cell. In one embodiment, the second CAR-expressing cell expresses a CAR comprising a different anti-BMCA binding domain, e.g., an anti-BCMA binding domain described herein that differs from the anti-BCMA binding domain in the CAR expressed by the first CAR-expressing cell. In one embodiment, the second CAR-expressing cell expresses a CAR comprising an antigen-binding domain that targets an antigen other than BCMA (e.g., CD19, CD20, CS-1, kappa light chain, CD139, Lewis Y antigen, or CD38). In one embodiment, a first CAR-expressing cell described herein, e.g., a BCMA CAR-expressing cell described herein, is used in combination with a second CAR-expressing cell comprising a CD19 CAR. In one embodiment, a BCMA CAR-expressing cell described herein is used in combination with a CD19 CAR-expressing cell to treat a BCMA-associated cancer described herein, e.g., multiple myeloma. In some embodiments, the multiple myeloma is CD19-negative, e.g., having a vast majority (e.g., at least 98%, 99%, 99.5%, 99.9%, or 99.95%) of the neoplastic plasma cells with a CD19-negative phenotype, e.g., as detected flow cytometry, RT-PCR, or both flow cytometry and RT-PCR. A CD19 CAR can be effective even against a CD19-negative multiple myeloma. While not wishing to be bound by theory, the CD19 CAR may act on a small but important CD19-positive population of neoplastic cells, by targeting a cell that expresses levels of CD19 that fall below the detection threshold of the assays described herein, or by targeting a non-neoplastic cell that supports the neoplastic cells. In embodiments, a CD19 CAR can remove B cells, e.g., B regulatory B cells.

[0780] For example, in one embodiment, the first CAR-expressing cell described herein, e.g., a BCMA CAR-expressing cell, and the second CAR-expressing cell described herein, e.g., a CD19 CAR-expressing cell, are prepared in the same composition and are administered simultaneously. In another embodiment, the first CAR-expressing cell described herein, e.g., a BCMA CAR-expressing cell, and the second CAR-expressing cell described herein, e.g., a CD19 CAR-expressing cell, are prepared in separate compositions, and the separate compositions are administered simultaneously or sequentially.

[0781] When the BCMA CAR-expressing cell and the second CAR-expressing cell are prepared in separate compositions, the BCMA CAR-expressing cell can be administered first, and the second CAR-expressing cell can be administered second, or the order of administration can be reversed.

[0782] In one embodiment, a CD19 CAR is a CD19 CAR, e.g., a humanized CD19 CAR, described in WO2014/153270, filed Mar. 15, 2014 (which is incorporated by reference herein in its entirety) or a sequence at least 95%, e.g., 95-99%, identical thereto. In some embodiments, the CD19 CAR construct is a CAR19 construct provided in PCT publication WO2012/079000 (which is incorporated by reference herein in its entirety) or a sequence at least 95%, e.g., 95-99%, identical thereto. In one embodiment, the anti-CD19 binding domain is a scFv described in WO2012/079000, or a sequence at least 95%, e.g., 95-99%, identical thereto.

[0783] In embodiments, a first CAR-expressing cell is administered to a subject, and a second CAR-expressing cell is administered to the subject. In embodiments, the first CAR-expressing cell comprises a CAR (e.g., BCMA or CD19 CAR) comprising a CD27 costimulatory domain and a CD3zeta (mutant or wild type) primary signaling domain. In embodiments, the second CAR-expressing cell comprises a CAR (e.g., BCMA CAR) comprising a 4-1BB costimulatory domain and a CD3zeta (mutant or wild type) primary signaling domain. Without wishing to be bound by theory, in embodiments, the first CAR-expressing cell can be less toxic than the second CAR-expressing cell and be used to debulk a tumor.

[0784] In one embodiment, a CAR-expressing cell described herein can be used in combination with a chemotherapeutic agent. Exemplary chemotherapeutic agents include an anthracycline (e.g., doxorubicin (e.g., liposomal doxorubicin)), a vinca alkaloid (e.g., vinblastine, vincristine, vindesine, vinorelbine), an alkylating agent (e.g., cyclophosphamide, decarbazine, melphalan, ifosfamide, temozolomide), an immune cell antibody (e.g., alemtuzamab, gemtuzumab, rituximab, tositumomab), an antimetabolite (including, e.g., folic acid antagonists, pyrimidine analogs, purine analogs and adenosine deaminase inhibitors (e.g., fludarabine)), an mTOR inhibitor, a TNFR glucocorticoid induced TNFR related protein (GITR) agonist, a proteasome inhibitor (e.g., aclacinomycin A, gliotoxin or bortezomib), an immunomodulator such as thalidomide or a thalidomide derivative (e.g., lenalidomide).

[0785] General Chemotherapeutic agents considered for use in combination therapies include anastrozole (Arimidex®), bicalutamide (Casodex®), bleomycin sulfate (Blenoxane®), busulfan (Myleran®), busulfan injection (Busulfex®), capecitabine (Xeloda®), N4-pentoxycarbonyl-5-deoxy-5-fluorocytidine, carboplatin (Paraplatin®), carmustine (BiCNU®), chlorambucil (Leukeran®), cisplatin (Platinol®), cladribine (Leustatin®), cyclophosphamide (Cytoxan® or Neosar®), cytarabine, cytosine arabinoside (Cytosar-U®), cytarabine liposome injection (DepoCyt®), dacarbazine (DTIC-Dome®), dactinomycin (Actinomycin D, Cosmegan), daunorubicin hydrochloride (Cerubidine®), daunorubicin citrate liposome injection (DaunoXome®), dexamethasone, docetaxel (Taxotere®), doxorubicin hydrochloride (Adriamycin®, Rubex®), etoposide (Vepesid®), fludarabine phosphate (Fludara®), 5-fluorouracil (Adrucil®, Efudex®), flutamide (Eulexin®), tezacitibine, Gemcitabine (difluorodeoxycitidine), hydroxyurea (Hydrea®), Idarubicin (Idamycin®), ifosfamide (IFEX®), irinotecan (Camptosar®), L-asparaginase (ELSPAR®), leucovorin calcium, melphalan (Alkeran®), 6-mercaptopurine (Purinethol®), methotrexate (Folex®), mitoxantrone (Novantrone®), mylotarg, paclitaxel (Taxol®), phoenix (Yttrium90/MX-DTPA), pentostatin, polifeprosan 20 with carmustine implant (Gliadel®), tamoxifen citrate (Nolvadex®), teniposide (Vumon®), 6-thioguanine, thiotepa, tirapazamine (Tirazone®), topotecan hydrochloride for injection (Hycamptin®), vinblastine (Velban®), vincristine (Oncovin®), and vinorelbine (Navelbine®).

[0786] Anti-cancer agents of particular interest for combinations with the compounds of the present invention include: anthracyclines; alkylating agents; antimetabolites; drugs that inhibit either the calcium dependent phosphatase calcineurin or the p70S6 kinase FK506) or inhibit the p70S6 kinase; mTOR inhibitors; immunomodulators; anthracyclines; vinca alkaloids; proteosome inhibitors; GITR agonists; protein tyrosine phosphatase inhibitors; a CDK4 kinase inhibitor; a BTK inhibitor; a MKN kinase inhibitor; a DGK kinase inhibitor; or an oncolytic virus.

[0787] Exemplary alkylating agents include, without limitation, nitrogen mustards, ethylenimine derivatives, alkyl sulfonates, nitrosoureas and triazenes): uracil mustard (Aminouracil Mustard®, Chlorethaminacil®, Demethyldopan®, Desmethyldopan®, Haemanthamine®, Nordopan®, Uracil nitrogen Mustard®, Uracillost®, Uracilmostaza®, Uramustin®, Uramustine®), chlormethine (Mustargen®), cyclophosphamide (Cytoxan®, Neosar®, Clafen®, Endoxan®, Procytox®, Revimmune™), ifosfamide (Mitoxana®), melphalan (Alkeran®), Chlorambucil (Leukeran®), pipobroman (Amedel®, Vercyte®), triethylenemelamine (Hemel®, Hexalen®, Hexastat®), triethylenethiophosphoramine, Temozolomide (Temodar®), thiotepa (Thioplex®), busulfan (Busilvex®, Myleran®), carmustine (BiCNU®), lomustine (CeeNU®), streptozocin (Zanosar®), and Dacarbazine (DTIC-Dome®). Additional exemplary alkylating agents include, without limitation, Oxaliplatin (Eloxatin®); Temozolomide (Temodar® and Temodal®); Dactinomycin (also known as actinomycin-D, Cosmegen®); Melphalan (also known as L-PAM, L-sarcolysin, and phenylalanine mustard, Alkeran®); Altretamine (also known as hexamethylmelamine (HMM), Hexalen®); Carmustine (BiCNU®); Bendamustine (Treanda®); Busulfan (Busulfex® and Myleran®); Carboplatin (Paraplatin®); Lomustine (also known as CCNU, CeeNU®); Cisplatin (also known as CDDP, Platinol® and Platinol®-AQ); Chlorambucil (Leukeran®); Cyclophosphamide (Cytoxan® and Neosar®); Dacarbazine (also known as DTIC, DIC and imidazole carboxamide, DTIC-Dome®); Altretamine (also known as hexamethylmelamine (HMM), Hexalen®); Ifosfamide (Ifex®); Prednumustine; Procarbazine (Matulane®); Mechlorethamine (also known as nitrogen mustard, mustine and mechloroethamine hydrochloride, Mustargen®); Streptozocin (Zanosar®); Thiotepa (also known as thiophosphoamide, TESPA and TSPA, Thioplex®); Cyclophosphamide (Endoxan®, Cytoxan®, Neosar®, Procytox®, Revimmune®); and Bendamustine HCl (Treanda®).

[0788] Exemplary mTOR inhibitors include, e.g., temsirolimus; ridaforolimus (formally known as deferolimus, (1R,2R,4S)-4-[(2R)-2 [(1R,9S,12S,15R,16E,18R,19R,21R,23S,24E,26E,28Z,30S,32S,35R)-1,18-dihydroxy-19,30-dimethoxy-15,17,21,23,29,35-hexamethyl-2,3,10,14,20-pentaoxo-11,36-dioxa-4-azatricyclo[30.3.1.0^{4,9}]hexatriaconta-16,24,26,28-tetraen-12-yl]propyl]-2-methoxycyclohexyl dimethylphosphinate, also known as AP23573 and MK8669, and described in PCT Publication No. WO 03/064383); everolimus (Afinitor® or RAD001); rapamycin (AY22989, Sirolimus®); simapimod (CAS 164301-51-3); emsirolimus, (5-{2,4-Bis[(3S)-3-methylmorpholin-4-yl]pyrido[2,3-d]pyrimidin-7-yl}-2-methoxyphenyl)methanol (AZD8055); 2-Amino-8-[trans-4-(2-hydroxyethoxy)cyclohexyl]-6-(6-methoxy-3-pyridinyl)-4-methyl-pyrido[2,3-d]pyrimidin-7 (8H)-one (PF04691502, CAS 1013101-36-4); and N²-[1,4-dioxo-4-[[4-(4-oxo-8-phenyl-4H-1-benzopyran-2-yl)morpholinium-4-yl]methoxy]butyl]-L-arginylglycyl-L-α-aspartylL-serine- (SEQ ID NO: 383), inner salt (SF1126, CAS 936487-67-1), and XL765.

[0789] Exemplary immunomodulators include, e.g., afutuzumab (available from Roche®); pegfilgrastim (Neulasta®); lenalidomide (CC-5013, Revlimid®); thalidomide (Thalomid®), actimid (CC4047); and IRX-2 (mixture of human cytokines including interleukin 1, interleukin 2, and interferon γ, CAS 951209-71-5, available from IRX Therapeutics).

[0790] Exemplary anthracyclines include, e.g., doxorubicin (Adriamycin® and Rubex®); bleomycin (Lenoxane®); daunorubicin (dauorubicin hydrochloride, daunomycin, and rubidomycin hydrochloride, Cerubidine®); daunorubicin liposomal (daunorubicin citrate liposome, DaunoXome®); mitoxantrone (DHAD, Novantrone®); epirubicin (Ellence™); idarubicin (Idamycin®, Idamycin PFS®); mitomycin C (Mutamycin®); geldanamycin; herbimycin; ravidomycin; and desacetylravidomycin.

[0791] Exemplary vinca alkaloids include, e.g., vinorelbine tartrate (Navelbine®), Vincristine (Oncovin®), and Vindesine (Eldisine®)); vinblastine (also known as vinblastine sulfate, vincaleukoblastine and VLB, Alkaban-AQ® and Velban®); and vinorelbine (Navelbine®).

[0792] Exemplary proteosome inhibitors include bortezomib (Velcade®); carfilzomib (PX-171-007, (S)-4-Methyl-N—((S)-1-(((S)-4-methyl-1-((R)-2-methyloxiran-2-yl)-1-oxopentan-2-yl)amino)-1-oxo-3-phenylpropan-2-yl)-2-((S)-2-(2-morpholinoacetamido)-4-phenylbutanamido)-pentanamide); marizomib (NPI-0052); ixazomib citrate (MLN-9708); delanzomib (CEP-18770); and O-Methyl-N-[(2-methyl-5-thiazolyl)carbonyl]-L-seryl-O-methyl-N-[(1S)-2-[(2R)-2-methyl-2-oxiranyl]-2-oxo-1-(phenylmethyl)ethyl]-L-serinamide (ONX-0912).

[0793] In embodiments, a CAR-expressing cell described herein is administered to a subject in combination with fludarabine, cyclophosphamide, and/or rituximab. In embodiments, a CAR-expressing cell described herein is administered to a subject in combination with fludarabine, cyclophosphamide, and rituximab (FCR). In embodiments, the subject has CLL. For example, the subject has a deletion in the short arm of chromosome 17 (del(17p), e.g., in a leukemic cell). In other examples, the subject does not have a del(17p). In embodiments, the subject comprises a leukemic cell comprising a mutation in the immunoglobulin heavy-chain variable-region (IgV_{H}) gene. In other embodiments, the subject does not comprise a leukemic cell comprising a mutation in the immunoglobulin heavy-chain variable-region (IgV_{H}) gene. In embodiments, the fludarabine is administered at a dosage of about 10-50 mg/m² (e.g., about 10-15, 15-20, 20-25, 25-30, 30-35, 35-40, 40-45, or 45-50 mg/m²), e.g., intravenously. In embodiments, the cyclophosphamide is administered at a dosage of about 200-300 mg/m² (e.g., about 200-225, 225-250, 250-275, or 275-300 mg/m²), e.g., intravenously. In embodiments, the rituximab is administered at a dosage of about 400-600 mg/m2 (e.g., 400-450, 450-500, 500-550, or 550-600 mg/m²), e.g., intravenously.

[0794] In embodiments, a CAR-expressing cell described herein is administered to a subject in combination with bendamustine and rituximab. In embodiments, the subject has CLL. For example, the subject has a deletion in the short arm of chromosome 17 (del(17p), e.g., in a leukemic cell). In other examples, the subject does not have a del(17p). In embodiments, the subject comprises a leukemic cell comprising a mutation in the immunoglobulin heavy-chain variable-region (IgV_{H}) gene. In other embodiments, the subject does not comprise a leukemic cell comprising a mutation in the immunoglobulin heavy-chain variable-region (IgV_{H}) gene. In embodiments, the bendamustine is administered at a dosage of about 70-110 mg/m2 (e.g., 70-80, 80-90, 90-100, or 100-110 mg/m2), e.g., intravenously. In embodiments, the rituximab is administered at a dosage of about 400-600 mg/m2 (e.g., 400-450, 450-500, 500-550, or 550-600 mg/m²), e.g., intravenously.

[0795] In embodiments, a CAR-expressing cell described herein is administered to a subject in combination with rituximab, cyclophosphamide, doxorubicine, vincristine, and/or a corticosteroid (e.g., prednisone). In embodiments, a CAR-expressing cell described herein is administered to a subject in combination with rituximab, cyclophosphamide, doxorubicine, vincristine, and prednisone (R-CHOP).

[0796] In embodiments, the subject has diffuse large B-cell lymphoma (DLBCL). In embodiments, the subject has nonbulky limited-stage DLBCL (e.g., comprises a tumor having a size/diameter of less than 7 cm). In embodiments, the subject is treated with radiation in combination with the R-CHOP. For example, the subject is administered R-CHOP (e.g., 1-6 cycles, e.g., 1, 2, 3, 4, 5, or 6 cycles of R-CHOP), followed by radiation. In some cases, the subject is administered R-CHOP (e.g., 1-6 cycles, e.g., 1, 2, 3, 4, 5, or 6 cycles of R-CHOP) following radiation.

[0797] In embodiments, a CAR-expressing cell described herein is administered to a subject in combination with etoposide, prednisone, vincristine, cyclophosphamide, doxorubicin, and/or rituximab. In embodiments, a CAR-expressing cell described herein is administered to a subject in combination with etoposide, prednisone, vincristine, cyclophosphamide, doxorubicin, and rituximab (EPOCH-R). In embodiments, a CAR-expressing cell described herein is administered to a subject in combination with dose-adjusted EPOCH-R (DA-EPOCH-R). In embodiments, the subject has a B cell lymphoma, e.g., a Myc-rearranged aggressive B cell lymphoma.

[0798] In embodiments, a CAR-expressing cell described herein is administered to a subject in combination with rituximab and/or lenalidomide. Lenalidomide ((RS)-3-(4-Amino-1-oxo 1,3-dihydro-2H-isoindol-2-yl)piperidine-2,6-dione) is an immunomodulator. In embodiments, a CAR-expressing cell described herein is administered to a subject in combination with rituximab and lenalidomide. In embodiments, the subject has follicular lymphoma (FL) or mantle cell lymphoma (MCL). In embodiments, the subject has FL and has not previously been treated with a cancer therapy. In embodiments, lenalidomide is administered at a dosage of about 10-20 mg (e.g., 10-15 or 15-20 mg), e.g., daily. In embodiments, rituximab is administered at a dosage of about 350-550 mg/m² (e.g., 350-375, 375-400, 400-425, 425-450, 450-475, or 475-500 mg/m²), e.g., intravenously.

[0799] In embodiments, a CAR-expressing cell described herein is administered to a subject in combination with brentuximab. Brentuximab is an antibody-drug conjugate of anti-CD30 antibody and monomethyl auristatin E. In embodiments, the subject has Hodgkin's lymphoma (HL), e.g., relapsed or refractory HL. In embodiments, the subject comprises CD30+ HL. In embodiments, the subject has undergone an autologous stem cell transplant (ASCT). In embodiments, the subject has not undergone an ASCT. In embodiments, brentuximab is administered at a dosage of about 1-3 mg/kg (e.g., about 1-1.5, 1.5-2, 2-2.5, or 2.5-3 mg/kg), e.g., intravenously, e.g., every 3 weeks.

[0800] In embodiments, a CAR-expressing cell described herein is administered to a subject in combination with brentuximab and dacarbazine or in combination with brentuximab and bendamustine. Dacarbazine is an alkylating agent with a chemical name of 5-(3,3-Dimethyl-1-triazenyl)imidazole-4-carboxamide. Bendamustine is an alkylating agent with a chemical name of 4-[5-[Bis(2-chloroethyl)amino]-1-methylbenzimidazol-2-yl]butanoic acid. In embodiments, the subject has Hodgkin's lymphoma (HL). In embodiments, the subject has not previously been treated with a cancer therapy. In embodiments, the subject is at least 60 years of age, e.g., 60, 65, 70, 75, 80, 85, or older. In embodiments, dacarbazine is administered at a dosage of about 300-450 mg/m² (e.g., about 300-325, 325-350, 350-375, 375-400, 400-425, or 425-450 mg/m²), e.g., intravenously. In embodiments, bendamustine is administered at a dosage of about 75-125 mg/m2 (e.g., 75-100 or 100-125 mg/m², e.g., about 90 mg/m²), e.g., intravenously. In embodiments, brentuximab is administered at a dosage of about 1-3 mg/kg (e.g., about 1-1.5, 1.5-2, 2-2.5, or 2.5-3 mg/kg), e.g., intravenously, e.g., every 3 weeks.

[0801] In some embodiments, a CAR-expressing cell described herein is administered to a subject in combination with a CD20 inhibitor, e.g., an anti-CD20 antibody (e.g., an anti-CD20 mono- or bispecific antibody) or a fragment thereof. Exemplary anti-CD20 antibodies include but are not limited to rituximab, ofatumumab, ocrelizumab, veltuzumab, obinutuzumab, TRU-015 (Trubion Pharmaceuticals), ocaratuzumab, and Pro131921 (Genentech). See, e.g., Lim et al. Haematologica. 95.1(2010):135-43.

[0802] In some embodiments, the anti-CD20 antibody comprises rituximab. Rituximab is a chimeric mouse/human monoclonal antibody IgG1 kappa that binds to CD20 and causes cytolysis of a CD20 expressing cell, e.g., as described in www.accessdata.fda.gov/drugsatfda_docs/label/2010/103705s5311lbl.pdf. In embodiments, a CAR-expressing cell described herein is administered to a subject in combination with rituximab. In embodiments, the subject has CLL or SLL.

[0803] In some embodiments, rituximab is administered intravenously, e.g., as an intravenous infusion. For example, each infusion provides about 500-2000 mg (e.g., about 500-550, 550-600, 600-650, 650-700, 700-750, 750-800, 800-850, 850-900, 900-950, 950-1000, 1000-1100, 1100-1200, 1200-1300, 1300-1400, 1400-1500, 1500-1600, 1600-1700, 1700-1800, 1800-1900, or 1900-2000 mg) of rituximab.

[0804] In some embodiments, rituximab is administered at a dose of 150 mg/m² to 750 mg/m², e.g., about 150-175 mg/m², 175-200 mg/m², 200-225 mg/m², 225-250 mg/m², 250-300 mg/m², 300-325 mg/m², 325-350 mg/m², 350-375 mg/m², 375-400 mg/m², 400-425 mg/m², 425-450 mg/m², 450-475 mg/m², 475-500 mg/m², 500-525 mg/m², 525-550 mg/m², 550-575 mg/m², 575-600 mg/m², 600-625 mg/m², 625-650 mg/m², 650-675 mg/m², or 675-700 mg/m², where m² indicates the body surface area of the subject.

[0805] In some embodiments, rituximab is administered at a dosing interval of at least 4 days, e.g., 4, 7, 14, 21, 28, 35 days, or more. For example, rituximab is administered at a dosing interval of at least 0.5 weeks, e.g., 0.5, 1, 2, 3, 4, 5, 6, 7, 8 weeks, or more. In some embodiments, rituximab is administered at a dose and dosing interval described herein for a period of time, e.g., at least 2 weeks, e.g., at least 2, 3, 4, 5, 6, 7, 8, 9, 10, 11, 12, 13, 14, 15, 16, 17, 18, 19, 20 weeks, or greater. For example, rituximab is administered at a dose and dosing interval described herein for a total of at least 4 doses per treatment cycle (e.g., at least 4, 5, 6, 7, 8, 9, 10, 11, 12, 13, 14, 15, 16, or more doses per treatment cycle).

[0806] In some embodiments, the anti-CD20 antibody comprises ofatumumab. Ofatumumab is an anti-CD20 IgG1κ human monoclonal antibody with a molecular weight of approximately 149 kDa. For example, ofatumumab is generated using transgenic mouse and hybridoma technology and is expressed and purified from a recombinant murine cell line (NSO). See, e.g., www.accessdata.fda.gov/drugsatfda_docs/label/2009/125326lbl.pdf; and Clinical Trial Identifier number NCT01363128, NCT01515176, NCT01626352, and NCT01397591. In embodiments, a CAR-expressing cell described herein is administered to a subject in combination with ofatumumab. In embodiments, the subject has CLL or SLL.

[0807] In some embodiments, ofatumumab is administered as an intravenous infusion. For example, each infusion provides about 150-3000 mg (e.g., about 150-200, 200-250, 250-300, 300-350, 350-400, 400-450, 450-500, 500-550, 550-600, 600-650, 650-700, 700-750, 750-800, 800-850, 850-900, 900-950, 950-1000, 1000-1200, 1200-1400, 1400-1600, 1600-1800, 1800-2000, 2000-2200, 2200-2400, 2400-2600, 2600-2800, or 2800-3000 mg) of ofatumumab. In embodiments, ofatumumab is administered at a starting dosage of about 300 mg, followed by 2000 mg, e.g., for about 11 doses, e.g., for 24 weeks. In some embodiments, ofatumumab is administered at a dosing interval of at least 4 days, e.g., 4, 7, 14, 21, 28, 35 days, or more. For example, ofatumumab is administered at a dosing interval of at least 1 week, e.g., 1, 2, 3, 4, 5, 6, 7, 8, 9, 10, 11, 12, 24, 26, 28, 20, 22, 24, 26, 28, 30 weeks, or more. In some embodiments, ofatumumab is administered at a dose and dosing interval described herein for a period of time, e.g., at least 1 week, e.g., 1, 2, 3, 4, 5, 6, 7, 8, 9, 10, 11, 12, 13, 14, 15, 16, 17, 18, 19, 20, 22, 24, 26, 28, 30, 40, 50, 60 weeks or greater, or 1, 2, 3, 4, 5, 6, 7, 8, 9, 10, 11, 12 months or greater, or 1, 2, 3, 4, 5 years or greater. For example, ofatumumab is administered at a dose and dosing interval described herein for a total of at least 2 doses per treatment cycle (e.g., at least 2, 3, 4, 5, 6, 7, 8, 9, 10, 11, 12, 13, 14, 15, 16, 18, 20, or more doses per treatment cycle).

[0808] In some cases, the anti-CD20 antibody comprises ocrelizumab. Ocrelizumab is a humanized anti-CD20 monoclonal antibody, e.g., as described in Clinical Trials Identifier Nos. NCT00077870, NCT01412333, NCT00779220, NCT00673920, NCT01194570, and Kappos et al. Lancet. 19.378(2011):1779-87.

[0809] In some cases, the anti-CD20 antibody comprises veltuzumab. Veltuzumab is a humanized monoclonal antibody against CD20. See, e.g., Clinical Trial Identifier No. NCT00547066, NCT00546793, NCT01101581, and Goldenberg et al. Leuk Lymphoma. 51(5)(2010):747-55.

[0810] In some cases, the anti-CD20 antibody comprises GA101. GA101 (also called obinutuzumab or R05072759) is a humanized and glyco-engineered anti-CD20 monoclonal antibody. See, e.g., Robak. Curr. Opin. Investig. Drugs. 10.6(2009):588-96; Clinical Trial Identifier Numbers: NCT01995669, NCT01889797, NCT02229422, and NCT01414205; and www.accessdata.fda.gov/drugsatfda_docs/label/2013/125486s000lbl.pdf.

[0811] In some cases, the anti-CD20 antibody comprises AME-133v. AME-133v (also called LY2469298 or ocaratuzumab) is a humanized IgG1 monoclonal antibody against CD20 with increased affinity for the FcγRIIIa receptor and an enhanced antibody dependent cellular cytotoxicity (ADCC) activity compared with rituximab. See, e.g., Robak et al. BioDrugs 25.1(2011):13-25; and Forero-Torres et al. Clin Cancer Res. 18.5(2012):1395-403.

[0812] In some cases, the anti-CD20 antibody comprises PRO131921. PRO131921 is a humanized anti-CD20 monoclonal antibody engineered to have better binding to FcγRIIIa and enhanced ADCC compared with rituximab. See, e.g., Robak et al. BioDrugs 25.1(2011):13-25; and Casulo et al. Clin Immunol. 154.1(2014):37-46; and Clinical Trial Identifier No. NCT00452127.

[0813] In some cases, the anti-CD20 antibody comprises TRU-015. TRU-015 is an anti-CD20 fusion protein derived from domains of an antibody against CD20. TRU-015 is smaller than monoclonal antibodies, but retains Fc-mediated effector functions. See, e.g., Robak et al. BioDrugs 25.1(2011):13-25. TRU-015 contains an anti-CD20 single-chain variable fragment (scFv) linked to human IgG1 hinge, CH2, and CH3 domains but lacks CH1 and CL domains.

[0814] In some embodiments, an anti-CD20 antibody described herein is conjugated or otherwise bound to a therapeutic agent, e.g., a chemotherapeutic agent (e.g., cytoxan, fludarabine, histone deacetylase inhibitor, demethylating agent, peptide vaccine, anti-tumor antibiotic, tyrosine kinase inhibitor, alkylating agent, anti-microtubule or anti-mitotic agent), anti-allergic agent, anti-nausea agent (or anti-emetic), pain reliever, or cytoprotective agent described herein.

[0815] In embodiments, a CAR-expressing cell described herein is administered to a subject in combination with a B-cell lymphoma 2 (BCL-2) inhibitor (e.g., venetoclax, also called ABT-199 or GDC-0199) and/or rituximab. In embodiments, a CAR-expressing cell described herein is administered to a subject in combination with venetoclax and rituximab. Venetoclax is a small molecule that inhibits the anti-apoptotic protein, BCL-2. The structure of venetoclax (4-(4-{[2-(4-chlorophenyl)-4,4-dimethylcyclohex-1-en-1-yl]methyl}piperazin-1-yl)-N-({3-nitro-4-[tetrahydro-2H-pyran-4-ylmethyl)amino]phenyl}sulfonyl)-2-(1H-pyrrolo{2,3-b}pyridin-5-yloxy)benzamide) is shown below.

[chemical structure]

[0816] In embodiments, the subject has CLL. In embodiments, the subject has relapsed CLL, e.g., the subject has previously been administered a cancer therapy. In embodiments, venetoclax is administered at a dosage of about 15-600 mg (e.g., 15-20, 20-50, 50-75, 75-100, 100-200, 200-300, 300-400, 400-500, or 500-600 mg), e.g., daily. In embodiments, rituximab is administered at a dosage of about 350-550 mg/m2 (e.g., 350-375, 375-400, 400-425, 425-450, 450-475, or 475-500 mg/m2), e.g., intravenously, e.g., monthly.

[0817] Without being bound by theory, it is believed that in some cancers, B cells (e.g., B regulatory cells) can suppress T cells. Further, it is believed that a combination of oxiplatin and the B cell depleting agent may reduce tumor size and/or eliminate tumors in a subject. In some embodiments, a CAR-expressing cell described herein (e.g., BCMA CAR) is administered in combination with a B cell depleting agent (e.g., a CD19 CAR-expressing cell, a CD20 CAR-expressing cell, rituximab, ocrelizumab, epratuzumab, or belimumab) and oxiplatin. In embodiments, the cancer cell can be CD19 negative or CD19 positive; or BCMA negative or BMCA positive. In embodiments, a CAR-expressing cell described herein (e.g., BCMA CAR) is administered in combination with a B cell depleting agent and oxiplatin to treat a cancer, e.g., a cancer described herein, e.g., solid cancer, e.g., prostate cancer, pancreatic cancer, or lung cancer.

[0818] In embodiments, a CAR-expressing cell described herein (e.g., BCMA CAR) may deplete B cells (e.g., B cells having a plasma cell-like phenotype, e.g., that express BCMA, CD19, and/or CD20) in a subject. In embodiments, the B cell can be CD19 negative or CD19 positive; or BCMA negative or BMCA positive. In some embodiments, a CAR-expressing cell described herein (e.g., BCMA CAR) is administered in combination with oxiplatin. In embodiments, a CAR-expressing cell described herein is administered in combination with oxiplatin is used to treat a cancer, e.g., solid cancer, e.g., prostate cancer, pancreatic cancer, or lung cancer. In some embodiments, a CAR-expressing cell described herein is administered in combination with an oncolytic virus. In embodiments, oncolytic viruses are capable of selectively replicating in and triggering the death of or slowing the growth of a cancer cell. In some cases, oncolytic viruses have no effect or a minimal effect on non-cancer cells. An oncolytic virus includes but is not limited to an oncolytic adenovirus, oncolytic Herpes Simplex Viruses, oncolytic retrovirus, oncolytic parvovirus, oncolytic vaccinia virus, oncolytic Sinbis virus, oncolytic influenza virus, or oncolytic RNA virus (e.g., oncolytic reovirus, oncolytic Newcastle Disease Virus (NDV), oncolytic measles virus, or oncolytic vesicular stomatitis virus (VSV)).

[0819] In some embodiments, the oncolytic virus is a virus, e.g., recombinant oncolytic virus, described in US2010/0178684 A1, which is incorporated herein by reference in its entirety. In some embodiments, a recombinant oncolytic virus comprises a nucleic acid sequence (e.g., heterologous nucleic acid sequence) encoding an inhibitor of an immune or inflammatory response, e.g., as described in US2010/0178684 A1, incorporated herein by reference in its entirety. In embodiments, the recombinant oncolytic virus, e.g., oncolytic NDV, comprises a pro-apoptotic protein (e.g., apoptin), a cytokine (e.g., GM-CSF, interferon-gamma, interleukin-2 (IL-2), tumor necrosis factor-alpha), an immunoglobulin (e.g., an antibody against ED-B firbonectin), tumor associated antigen, a bispecific adapter protein (e.g., bispecific antibody or antibody fragment directed against NDV HN protein and a T cell co-stimulatory receptor, such as CD3 or CD28; or fusion protein between human IL-2 and single chain antibody directed against NDV HN protein). See, e.g., Zamarin et al. Future Microbiol. 7.3(2012):347-67, incorporated herein by reference in its entirety. In some embodiments, the oncolytic virus is a chimeric oncolytic NDV described in U.S. Pat. No. 8,591,881 B2, US 2012/0122185 A1, or US 2014/0271677 A1, each of which is incorporated herein by reference in their entireties.

[0820] In some embodiments, the oncolytic virus comprises a conditionally replicative adenovirus (CRAd), which is designed to replicate exclusively in cancer cells. See, e.g., Alemany et al. Nature Biotechnol. 18(2000):723-27. In some embodiments, an oncolytic adenovirus comprises one described in Table 1 on page 725 of Alemany et al., incorporated herein by reference in its entirety.

[0821] Exemplary oncolytic viruses include but are not limited to the following:

[0822] Group B Oncolytic Adenovirus (ColoAdl) (PsiOxus Therapeutics Ltd.) (see, e.g., Clinical Trial Identifier: NCT02053220);

[0823] ONCOS-102 (previously called CGTG-102), which is an adenovirus comprising granulocyte-macrophage colony stimulating factor (GM-CSF) (Oncos Therapeutics) (see, e.g., Clinical Trial Identifier: NCT01598129);

[0824] VCN-01, which is a genetically modified oncolytic human adenovirus encoding human PH20 hyaluronidase (VCN Biosciences, S.L.) (see, e.g., Clinical Trial Identifiers: NCT02045602 and NCT02045589);

[0825] Conditionally Replicative Adenovirus ICOVIR-5, which is a virus derived from wild-type human adenovirus serotype 5 (Had5) that has been modified to selectively replicate in cancer cells with a deregulated retinoblastoma/E2F pathway (Institut Catalá d'Oncologia) (see, e.g., Clinical Trial Identifier: NCT01864759);

[0826] Celyvir, which comprises bone marrow-derived autologous mesenchymal stem cells (MSCs) infected with ICOVIR5, an oncolytic adenovirus (Hospital Infantil Universitario Niño Jesús, Madrid, Spain/Ramon Alemany) (see, e.g., Clinical Trial Identifier: NCT01844661);

[0827] CG0070, which is a conditionally replicating oncolytic serotype 5 adenovirus (Ad5) in which human E2F-1 promoter drives expression of the essential E1a viral genes, thereby restricting viral replication and cytotoxicity to Rb pathway-defective tumor cells (Cold Genesys, Inc.) (see, e.g., Clinical Trial Identifier: NCT02143804); or

[0828] DNX-2401 (formerly named Delta-24-RGD), which is an adenovirus that has been engineered to replicate selectively in retinoblastoma (Rb)-pathway deficient cells and to infect cells that express certain RGD-binding integrins more efficiently (Clinica Universidad de Navarra, Universidad de Navarra/DNAtrix, Inc.) (see, e.g., Clinical Trial Identifier: NCT01956734).

[0829] In some embodiments, an oncolytic virus described herein is administering by injection, e.g., subcutaneous, intra-arterial, intravenous, intramuscular, intrathecal, or intraperitoneal injection. In embodiments, an oncolytic virus described herein is administered intratumorally, transdermally, transmucosally, orally, intranasally, or via pulmonary administration.

[0830] In an embodiment, cells expressing a CAR described herein are administered to a subject in combination with a molecule that decreases the Treg cell population. Methods that decrease the number of (e.g., deplete) Treg cells are known in the art and include, e.g., CD25 depletion, cyclophosphamide administration, modulating GITR function. Without wishing to be bound by theory, it is believed that reducing the number of Treg cells in a subject prior to apheresis or prior to administration of a CAR-expressing cell described herein reduces the number of unwanted immune cells (e.g., Tregs) in the tumor microenvironment and reduces the subject's risk of relapse. In one embodiment, a CAR expressing cell described herein is administered to a subject in combination with a a molecule targeting GITR and/or modulating GITR functions, such as a GITR agonist and/or a GITR antibody that depletes regulatory T cells (Tregs). In embodiments, cells expressing a CAR described herein are administered to a subject in combination with cyclophosphamide. In one embodiment, the GITR binding molecules and/or molecules modulating GITR functions (e.g., GITR agonist and/or Treg depleting GITR antibodies) are administered prior to administration of the CAR-expressing cell. For example, in one embodiment, the GITR agonist can be administered prior to apheresis of the cells. In embodiments, cyclophosphamide is administered to the subject prior to administration (e.g., infusion or re-infusion) of the CAR-expressing cell or prior to aphersis of the cells. In embodiments, cyclophosphamide and an anti-GITR antibody are administered to the subject prior to administration (e.g., infusion or re-infusion) of the CAR-expressing cell or prior to apheresis of the cells. In one embodiment, the subject has cancer (e.g., a solid cancer or a hematological cancer such as multiple myeloma, ALL or CLL). In an embodiment, the subject has CLL. In embodiments, the subject has multiple myeloma. In embodiments, the subject has a solid cancer, e.g., a solid cancer described herein. Exemplary GITR agonists include, e.g., GITR fusion proteins and anti-GITR antibodies (e.g., bivalent anti-GITR antibodies) such as, e.g., a GITR fusion protein described in U.S. Pat. No. 6,111,090, European Patent No.: 090505B1, U.S. Pat. No. 8,586,023, PCT Publication Nos.: WO 2010/003118 and 2011/090754, or an anti-GITR antibody described, e.g., in U.S. Pat. No. 7,025,962, European Patent No.: 1947183B1, U.S. Pat. Nos. 7,812,135, 8,388,967, 8,591,886, European Patent No.: EP 1866339, PCT Publication No.: WO 2011/028683, PCT Publication No.: WO 2013/039954, PCT Publication No.: WO2005/007190, PCT Publication No.: WO 2007/133822, PCT Publication No.: WO2005/055808, PCT Publication No.: WO 99/40196, PCT Publication No.: WO 2001/03720, PCT Publication No.: WO99/20758, PCT Publication No.: WO2006/083289, PCT Publication No.: WO 2005/115451, U.S. Pat. No. 7,618,632, and PCT Publication No.: WO 2011/051726.

[0831] In one embodiment, a CAR expressing cell described herein is administered to a subject in combination with an mTOR inhibitor, e.g., an mTOR inhibitor described herein, e.g., a rapalog such as everolimus. In one embodiment, the mTOR inhibitor is administered prior to the CAR-expressing cell. For example, in one embodiment, the mTOR inhibitor can be administered prior to apheresis of the cells.

[0832] In one embodiment, a CAR expressing cell described herein is administered to a subject in combination with a GITR agonist, e.g., a GITR agonist described herein. In one embodiment, the GITR agonist is administered prior to the CAR-expressing cell. For example, in one embodiment, the GITR agonist can be administered prior to apheresis of the cells.

[0833] In one embodiment, a CAR expressing cell described herein is administered to a subject in combination with a protein tyrosine phosphatase inhibitor, e.g., a protein tyrosine phosphatase inhibitor described herein. In one embodiment, the protein tyrosine phosphatase inhibitor is an SHP-1 inhibitor, e.g., an SHP-1 inhibitor described herein, such as, e.g., sodium stibogluconate. In one embodiment, the protein tyrosine phosphatase inhibitor is an SHP-2 inhibitor.

[0834] In one embodiment, a CAR-expressing cell described herein can be used in combination with a kinase inhibitor. In one embodiment, the kinase inhibitor is a CDK4 inhibitor, e.g., a CDK4 inhibitor described herein, e.g., a CDK4/6 inhibitor, such as, e.g., 6-Acetyl-8-cyclopentyl-5-methyl-2-(5-piperazin-1-yl-pyridin-2-ylamino)-8H-pyrido[2,3-d]pyrimidin-7-one, hydrochloride (also referred to as palbociclib or PD0332991). In one embodiment, the kinase inhibitor is a BTK inhibitor, e.g., a BTK inhibitor described herein, such as, e.g., ibrutinib. In one embodiment, the kinase inhibitor is an mTOR inhibitor, e.g., an mTOR inhibitor described herein, such as, e.g., rapamycin, a rapamycin analog, OSI-027. The mTOR inhibitor can be, e.g., an mTORC1 inhibitor and/or an mTORC2 inhibitor, e.g., an mTORC1 inhibitor and/or mTORC2 inhibitor described herein. In one embodiment, the kinase inhibitor is a MNK inhibitor, e.g., a MNK inhibitor described herein, such as, e.g., 4-amino-5-(4-fluoroanilino)-pyrazolo[3,4-d]pyrimidine. The MNK inhibitor can be, e.g., a MNK1a, MNK1b, MNK2a and/or MNK2b inhibitor. In one embodiment, the kinase inhibitor is a dual PI3K/mTOR inhibitor described herein, such as, e.g., PF-04695102. In one embodiment, the kinase inhibitor is a DGK inhibitor, e.g., a DGK inhibitor described herein, such as, e.g., DGKinh1 (D5919) or DGKinh2 (D5794).

[0835] In one embodiment, the kinase inhibitor is a CDK4 inhibitor selected from aloisine A; flavopiridol or HMR-1275, 2-(2-chlorophenyl)-5,7-dihydroxy-8-[(3S,4R)-3-hydroxy-1-methyl-4-piperidinyl]-4-chromenone; crizotinib (PF-02341066; 2-(2-Chlorophenyl)-5,7-dihydroxy-8-[(2R,3S)-2-(hydroxymethyl)-1-methyl-3-pyrrolidinyl]-4H-1-benzopyran-4-one, hydrochloride (P276-00); 1-methyl-5-[[2-[5-(trifluoromethyl)-1H-imidazol-2-yl]-4-pyridinyl]oxy]-N-[4-(trifluoromethyl)phenyl]-1H-benzimidazol-2-amine (RAF265); indisulam (E7070); roscovitine (CYC202); palbociclib (PD0332991); dinaciclib (SCH727965); N-[5-[[(5-tert-butyloxazol-2-yl)methyl]thio]thiazol-2-yl]piperidine-4-carboxamide (BMS 387032); 4-[[9-chloro-7-(2,6-difluorophenyl)-5H-pyrimido[5,4-d][2]benzazepin-2-yl]amino]-benzoic acid (MLN8054); 5-[3-(4,6-difluoro-1H-benzimidazol-2-yl)-1H-indazol-5-yl]-N-ethyl-4-methyl-3-pyridinemethanamine (AG-024322); 4-(2,6-dichlorobenzoylamino)-1H-pyrazole-3-carboxylic acid N-(piperidin-4-yl)amide (AT7519); 4-[2-methyl-1-(1-methylethyl)-1H-imidazol-5-yl]-N-[4-(methylsulfonyl)phenyl]-2-pyrimidinamine (AZD5438); and XL281 (BMS908662).

[0836] In one embodiment, the kinase inhibitor is a CDK4 inhibitor, e.g., palbociclib (PD0332991), and the palbociclib is administered at a dose of about 50 mg, 60 mg, 70 mg, 75 mg, 80 mg, 90 mg, 100 mg, 105 mg, 110 mg, 115 mg, 120 mg, 125 mg, 130 mg, 135 mg (e.g., 75 mg, 100 mg or 125 mg) daily for a period of time, e.g., daily for 14-21 days of a 28 day cycle, or daily for 7-12 days of a 21 day cycle. In one embodiment, 1, 2, 3, 4, 5, 6, 7, 8, 9, 10, 11, 12 or more cycles of palbociclib are administered.

[0837] In embodiments, a CAR-expressing cell described herein is administered to a subject in combination with a cyclin-dependent kinase (CDK) 4 or 6 inhibitor, e.g., a CDK4 inhibitor or a CDK6 inhibitor described herein. In embodiments, a CAR-expressing cell described herein is administered to a subject in combination with a CDK4/6 inhibitor (e.g., an inhibitor that targets both CDK4 and CDK6), e.g., a CDK4/6 inhibitor described herein. In an embodiment, the subject has MCL. MCL is an aggressive cancer that is poorly responsive to currently available therapies, i.e., essentially incurable. In many cases of MCL, cyclin Dl (a regulator of CDK4/6) is expressed (e.g., due to chromosomal translocation involving immunoglobulin and Cyclin D1 genes) in MCL cells. Thus, without being bound by theory, it is thought that MCL cells are highly sensitive to CDK4/6 inhibition with high specificity (i.e., minimal effect on normal immune cells). CDK4/6 inhibitors alone have had some efficacy in treating MCL, but have only achieved partial remission with a high relapse rate. An exemplary CDK4/6 inhibitor is LEE011 (also called ribociclib), the structure of which is shown below.

[chemical structure]

[0838] Without being bound by theory, it is believed that administration of a CAR-expressing cell described herein with a CDK4/6 inhibitor (e.g., LEE011 or other CDK4/6 inhibitor described herein) can achieve higher responsiveness, e.g., with higher remission rates and/or lower relapse rates, e.g., compared to a CDK4/6 inhibitor alone.

[0839] In one embodiment, the kinase inhibitor is a BTK inhibitor selected from ibrutinib (PCI-32765); GDC-0834; RN-486; CGI-560; CGI-1764; HM-71224; CC-292; ONO-4059; CNX-774; and LFM-A13. In a preferred embodiment, the BTK inhibitor does not reduce or inhibit the kinase activity of interleukin-2-inducible kinase (ITK), and is selected from GDC-0834; RN-486; CGI-560; CGI-1764; HM-71224; CC-292; ONO-4059; CNX-774; and LFM-A13.

[0840] In one embodiment, the kinase inhibitor is a BTK inhibitor, e.g., ibrutinib (PCI-32765). In embodiments, a CAR-expressing cell described herein is administered to a subject in combination with a BTK inhibitor (e.g., ibrutinib). In embodiments, a CAR-expressing cell described herein is administered to a subject in combination with ibrutinib (also called PCI-32765). The structure of ibrutinib (1-[(3R)-3-[4-Amino-3-(4-phenoxyphenyl)-1H-pyrazolo[3,4-d]pyrimidin-1-yl]piperidin-1-yl]prop-2-en-1-one) is shown below.

[chemical structure]

[0841] In embodiments, the subject has CLL, mantle cell lymphoma (MCL), or small lymphocytic lymphoma (SLL). For example, the subject has a deletion in the short arm of chromosome 17 (del(17p), e.g., in a leukemic cell). In other examples, the subject does not have a del(17p). In embodiments, the subject has relapsed CLL or SLL, e.g., the subject has previously been administered a cancer therapy (e.g., previously been administered one, two, three, or four prior cancer therapies). In embodiments, the subject has refractory CLL or SLL. In other embodiments, the subject has follicular lymphoma, e.g., relapse or refractory follicular lymphoma. In some embodiments, ibrutinib is administered at a dosage of about 300-600 mg/day (e.g., about 300-350, 350-400, 400-450, 450-500, 500-550, or 550-600 mg/day, e.g., about 420 mg/day or about 560 mg/day), e.g., orally. In embodiments, the ibrutinib is administered at a dose of about 250 mg, 300 mg, 350 mg, 400 mg, 420 mg, 440 mg, 460 mg, 480 mg, 500 mg, 520 mg, 540 mg, 560 mg, 580 mg, 600 mg (e.g., 250 mg, 420 mg or 560 mg) daily for a period of time, e.g., daily for 21 day cycle cycle, or daily for 28 day cycle. In one embodiment, 1, 2, 3, 4, 5, 6, 7, 8, 9, 10, 11, 12 or more cycles of ibrutinib are administered. In some embodiments, ibrutinib is administered in combination with rituximab. See, e.g., Burger et al. (2013) Ibrutinib. In Combination With Rituximab (iR) Is Well Tolerated and Induces a High Rate Of Durable Remissions In Patients With High-Risk Chronic Lymphocytic Leukemia (CLL): New, Updated Results Of a Phase II Trial In 40 Patients, Abstract 675 presented at 55^{th} ASH Annual Meeting and Exposition, New Orleans, La. 7-10 Dec. Without being bound by theory, it is thought that the addition of ibrutinib enhances the T cell proliferative response and may shift T cells from a T-helper-2 (Th2) to T-helper-1 (Th1) phenotype. Th1 and Th2 are phenotypes of helper T cells, with Th1 versus Th2 directing different immune response pathways. A Th1 phenotype is associated with proinflammatory responses, e.g., for killing cells, such as intracellular pathogens/viruses or cancerous cells, or perpetuating autoimmune responses. A Th2 phenotype is associated with eosinophil accumulation and anti-inflammatory responses.

[0842] In some embodiments of the methods, uses, and compositions herein, the BTK inhibitor is a BTK inhibitor described in International Application WO/2015/079417, which is herein incorporated by reference in its entirety. For instance, in some embodiments, the BTK inhibitor is a compound of formula (I) or a pharmaceutically acceptable salt thereof;

[chemical structure]

[0843] wherein,

[0844] R1 is hydrogen, C1-C6 alkyl optionally substituted by hydroxy;

[0845] R2 is hydrogen or halogen;

[0846] R3 is hydrogen or halogen;

[0847] R4 is hydrogen;

[0848] R5 is hydrogen or halogen;

[0849] or R4 and R5 are attached to each other and stand for a bond, —CH2-, —CH2-CH2-, —CH═CH—, —CH═CH—CH2-; —CH2-CH═CH—; or —CH2-CH2-CH2-;

[0850] R6 and R7 stand independently from each other for H, C1-C6 alkyl optionally substituted by hydroxyl, C3-C6 cycloalkyl optionally substituted by halogen or hydroxy, or halogen;

[0851] R8, R9, R, R′, R10 and R11 independently from each other stand for H, or C1-C6 alkyl optionally substituted by C1-C6 alkoxy; or any two of R8, R9, R, R′, R10 and R11 together with the carbon atom to which they are bound may form a 3-6 membered saturated carbocyclic ring;

[0852] R12 is hydrogen or C1-C6 alkyl optionally substituted by halogen or C1-C6 alkoxy;

[0853] or R12 and any one of R8, R9, R, R′, R10 or R11 together with the atoms to which they are bound may form a 4, 5, 6 or 7 membered azacyclic ring, which ring may optionally be substituted by halogen, cyano, hydroxyl, C1-C6 alkyl or C1-C6 alkoxy;

[0854] n is 0 or 1; and

[0855] R13 is C2-C6 alkenyl optionally substituted by C1-C6 alkyl, C1-C6 alkoxy or N,N-di-C1-C6 alkyl amino; C2-C6 alkynyl optionally substituted by C1-C6 alkyl or C1-C6 alkoxy; or C2-C6 alkylenyl oxide optionally substituted by C1-C6 alkyl.

[0856] In some embodiments, the BTK inhibitor of Formula I is chosen from: N-(3-(5-((1-Acryloylazetidin-3-yl)oxy)-6-aminopyrimidin-4-yl)-5-fluoro-2-methylphenyl)-4-cyclopropyl-2-fluorobenzamide; (E)-N-(3-(6-Amino-5-((1-(but-2-enoyl)azetidin-3-yl)oxy)pyrimidin-4-yl)-5-fluoro-2-methylphenyl)-4-cyclopropyl-2-fluorobenzamide; N-(3-(6-Amino-5-((1-propioloylazetidin-3-yl)oxy)pyrimidin-4-yl)-5-fluoro-2-methylphenyl)-4-cyclopropyl-2-fluorobenzamide; N-(3-(6-Amino-5-((1-(but-2-ynoyl)azetidin-3-yl)oxy)pyrimidin-4-yl)-5-fluoro-2-methylphenyl)-4-cyclopropyl-2-fluorobenzamide; N-(3-(5-((1-Acryloylpiperidin-4-yl)oxy)-6-aminopyrimidin-4-yl)-5-fluoro-2-methylphenyl)-4-cyclopropyl-2-fluorobenzamide; N-(3-(6-Amino-5-(2-(N-methylacrylamido)ethoxy)pyrimidin-4-yl)-5-fluoro-2-methylphenyl)-4-cyclopropyl-2-fluorobenzamide; (E)-N-(3-(6-Amino-5-(2-(N-methylbut-2-enamido)ethoxy)pyrimidin-4-yl)-5-fluoro-2-methylphenyl)-4-cyclopropyl-2-fluorobenzamide; N-(3-(6-Amino-5-(2-(N-methylpropiolamido)ethoxy)pyrimidin-4-yl)-5-fluoro-2-methylphenyl)-4-cyclopropyl-2-fluorobenzamide; (E)-N-(3-(6-Amino-5-(2-(4-methoxy-N-methylbut-2-enamido)ethoxy)pyrimidin-4-yl)-5-fluoro-2-methylphenyl)-4-cyclopropyl-2-fluorobenzamide; N-(3-(6-Amino-5-(2-(N-methylbut-2-ynamido)ethoxy)pyrimidin-4-yl)-5-fluoro-2-methylphenyl)-4-cyclopropyl-2-fluorobenzamide; N-(2-((4-Amino-6-(3-(4-cyclopropyl-2-fluorobenzamido)-5-fluoro-2-methylphenyl)pyrimidin-5-yl)oxy)ethyl)-N-methyloxirane-2-carboxamide; N-(2-((4-Amino-6-(3-(6-cyclopropyl-8-fluoro-1-oxoisoquinolin-2(1H)-yl)phenyl)pyrimidin-5-yl)oxy)ethyl)-N-methylacrylamide; N-(3-(5-(2-Acrylamidoethoxy)-6-aminopyrimidin-4-yl)-5-fluoro-2-methylphenyl)-4-cyclopropyl-2-fluorobenzamide; N-(3-(6-Amino-5-(2-(N-ethylacrylamido)ethoxy)pyrimidin-4-yl)-5-fluoro-2-methylphenyl)-4-cyclopropyl-2-fluorobenzamide; N-(3-(6-Amino-5-(2-(N-(2-fluoroethyl)acrylamido)ethoxy)pyrimidin-4-yl)-5-fluoro-2-methylphenyl)-4-cyclopropyl-2-fluorobenzamide; N-(3-(5-((1-Acrylamidocyclopropyl)methoxy)-6-aminopyrimidin-4-yl)-5-fluoro-2-methylphenyl)-4-cyclopropyl-2-fluorobenzamide; (S)—N-(3-(5-(2-Acrylamidopropoxy)-6-aminopyrimidin-4-yl)-5-fluoro-2-methylphenyl)-4-cyclopropyl-2-fluorobenzamide; (S)—N-(3-(6-Amino-5-(2-(but-2-ynamido)propoxy)pyrimidin-4-yl)-5-fluoro-2-methylphenyl)-4-cyclopropyl-2-fluorobenzamide; (S)—N-(3-(6-Amino-5-(2-(N-methylacrylamido)propoxy)pyrimidin-4-yl)-5-fluoro-2-methylphenyl)-4-cyclopropyl-2-fluorobenzamide; (S)—N-(3-(6-Amino-5-(2-(N-methylbut-2-ynamido)propoxy)pyrimidin-4-yl)-5-fluoro-2-methylphenyl)-4-cyclopropyl-2-fluorobenzamide; N-(3-(6-Amino-5-(3-(N-methylacrylamido)propoxy)pyrimidin-4-yl)-5-fluoro-2-methylphenyl)-4-cyclopropyl-2-fluorobenzamide; (S)—N-(3-(5-((1-Acryloylpyrrolidin-2-yl)methoxy)-6-aminopyrimidin-4-yl)-5-fluoro-2-methylphenyl)-4-cyclopropyl-2-fluorobenzamide; (S)—N-(3-(6-Amino-5-((1-(but-2-ynoyl)pyrrolidin-2-yl)methoxy)pyrimidin-4-yl)-5-fluoro-2-methylphenyl)-4-cyclopropyl-2-fluorobenzamide; (S)-2-(3-(5-((1-Acryloylpyrrolidin-2-yl)methoxy)-6-aminopyrimidin-4-yl)-5-fluoro-2-(hydroxymethyl)phenyl)-6-cyclopropyl-3,4-dihydroisoquinolin-1(2H)-one; N-(2-((4-Amino-6-(3-(6-cyclopropyl-1-oxo-3,4-dihydroisoquinolin-2(1H)-yl)-5-fluoro-2-(hydroxymethyl)phenyl)pyrimidin-5-yl)oxy)ethyl)-N-methylacrylamide; N-(3-(5-(((2S,4R)-1-Acryloyl-4-methoxypyrrolidin-2-yl)methoxy)-6-aminopyrimidin-4-yl)-5-fluoro-2-methylphenyl)-4-cyclopropyl-2-fluorobenzamide; N-(3-(6-Amino-5-(((2S,4R)-1-(but-2-ynoyl)-4-methoxypyrrolidin-2-yl)methoxy)pyrimidin-4-yl)-5-fluoro-2-methylphenyl)-4-cyclopropyl-2-fluorobenzamide; 2-(3-(5-(((2S,4R)-1-Acryloyl-4-methoxypyrrolidin-2-yl)methoxy)-6-aminopyrimidin-4-yl)-5-fluoro-2-(hydroxymethyl)phenyl)-6-cyclopropyl-3,4-dihydroisoquinolin-1(2H)-one; N-(3-(5-(((2S,4S)-1-Acryloyl-4-methoxypyrrolidin-2-yl)methoxy)-6-aminopyrimidin-4-yl)-5-fluoro-2-methylphenyl)-4-cyclopropyl-2-fluorobenzamide; N-(3-(6-Amino-5-(((2S,4S)-1-(but-2-ynoyl)-4-methoxypyrrolidin-2-yl)methoxy)pyrimidin-4-yl)-5-fluoro-2-methylphenyl)-4-cyclopropyl-2-fluorobenzamide; N-(3-(5-(((2S,4R)-1-Acryloyl-4-fluoropyrrolidin-2-yl)methoxy)-6-aminopyrimidin-4-yl)-5-fluoro-2-methylphenyl)-4-cyclopropyl-2-fluorobenzamide; N-(3-(6-Amino-5-(((2S,4R)-1-(but-2-ynoyl)-4-fluoropyrrolidin-2-yl)methoxy)pyrimidin-4-yl)-5-fluoro-2-methylphenyl)-4-cyclopropyl-2-fluorobenzamide; (S)—N-(3-(5-((l-Acryloylazetidin-2-yl)methoxy)-6-aminopyrimidin-4-yl)-5-fluoro-2-methylphenyl)-4-cyclopropyl-2-fluorobenzamide; (S)—N-(3-(6-Amino-5-((1-propioloylazetidin-2-yl)methoxy)pyrimidin-4-yl)-5-fluoro-2-methylphenyl)-4-cyclopropyl-2-fluorobenzamide; (S)-2-(3-(5-((1-Acryloylazetidin-2-yl)methoxy)-6-aminopyrimidin-4-yl)-5-fluoro-2-(hydroxymethyl)phenyl)-6-cyclopropyl-3,4-dihydroisoquinolin-1(2H)-one; (R)—N-(3-(5-((1-Acryloylazetidin-2-yl)methoxy)-6-aminopyrimidin-4-yl)-5-fluoro-2-methylphenyl)-4-cyclopropyl-2-fluorobenzamide; (R)—N-(3-(5-((1-Acryloylpiperidin-3-yl)methoxy)-6-aminopyrimidin-4-yl)-5-fluoro-2-methylphenyl)-4-cyclopropyl-2-fluorobenzamide; N-(3-(5-(((2R,3S)-1-Acryloyl-3-methoxypyrrolidin-2-yl)methoxy)-6-aminopyrimidin-4-yl)-5-fluoro-2-methylphenyl)-4-cyclopropyl-2-fluorobenzamide; N-(3-(5-(((2S,4R)-1-Acryloyl-4-cyanopyrrolidin-2-yl)methoxy)-6-aminopyrimidin-4-yl)-5-fluoro-2-methylphenyl)-4-cyclopropyl-2-fluorobenzamide; or N-(3-(5-(((2S,4S)-1-Acryloyl-4-cyanopyrrolidin-2-yl)methoxy)-6-aminopyrimidin-4-yl)-5-fluoro-2-methylphenyl)-4-cyclopropyl-2-fluorobenzamide.

[0857] Unless otherwise provided, the chemical terms used above in describing the BTK inhibitor of Formula I are used according to their meanings as set out in International Application WO/2015/079417, which is herein incorporated by reference in its entirety.

[0858] In one embodiment, the kinase inhibitor is an mTOR inhibitor selected from temsirolimus; ridaforolimus (1R,2R,4S)-4-[(2R)-2[1R,9S,12S,15R,16E,18R,19R,21R,23S,24E,26E,28Z,30S,32S,35R)-1,18-dihydroxy-19,30-dimethoxy-15,17,21,23,29,35-hexamethyl-2,3,10,14,20-pentaoxo-11,36-dioxa-4-azatricyclo[30.3.1.0^{4,9}]hexatriaconta-16,24,26,28-tetraen-12-yl]propyl]-2-methoxycyclohexyl dimethylphosphinate, also known as AP23573 and MK8669; everolimus (RAD001); rapamycin (AY22989); simapimod; (5-{2,4-bis[(3S)-3-methylmorpholin-4-yl]pyrido[2,3-d]pyrimidin-7-yl}-2-methoxyphenyl)methanol (AZD8055); 2-amino-8-[trans-4-(2-hydroxyethoxy)cyclohexyl]-6-(6-methoxy-3-pyridinyl)-4-methyl-pyrido[2,3-d]pyrimidin-7(8H)-one (PF04691502); and N²-[1,4-dioxo-4-[[4-(4-oxo-8-phenyl-4H-1-benzopyran-2-yl)morpholinium-4-yl]methoxy]butyl]-L-arginylglycyl-L-α-aspartylL-serine- (SEQ ID NO: 383), inner salt (SF1126); and XL765.

[0859] In one embodiment, the kinase inhibitor is an mTOR inhibitor, e.g., rapamycin, and the rapamycin is administered at a dose of about 3 mg, 4 mg, 5 mg, 6 mg, 7 mg, 8 mg, 9 mg, 10 mg (e.g., 6 mg) daily for a period of time, e.g., daily for 21 day cycle cycle, or daily for 28 day cycle. In one embodiment, 1, 2, 3, 4, 5, 6, 7, 8, 9, 10, 11, 12 or more cycles of rapamycin are administered. In one embodiment, the kinase inhibitor is an mTOR inhibitor, e.g., everolimus and the everolimus is administered at a dose of about 2 mg, 2.5 mg, 3 mg, 4 mg, 5 mg, 6 mg, 7 mg, 8 mg, 9 mg, 10 mg, 11 mg, 12 mg, 13 mg, 14 mg, 15 mg (e.g., 10 mg) daily for a period of time, e.g., daily for 28 day cycle. In one embodiment, 1, 2, 3, 4, 5, 6, 7, 8, 9, 10, 11, 12 or more cycles of everolimus are administered.

[0860] In one embodiment, the kinase inhibitor is an MNK inhibitor selected from CGP052088; 4-amino-3-(p-fluorophenylamino)-pyrazolo[3,4-d]pyrimidine (CGP57380); cercosporamide; ETC-1780445-2; and 4-amino-5-(4-fluoroanilino)-pyrazolo[3,4-d]pyrimidine.

[0861] In embodiments, a CAR-expressing cell described herein is administered to a subject in combination with a phosphoinositide 3-kinase (PI3K) inhibitor (e.g., a PI3K inhibitor described herein, e.g., idelalisib or duvelisib) and/or rituximab. In embodiments, a CAR-expressing cell described herein is administered to a subject in combination with idelalisib and rituximab. In embodiments, a CAR-expressing cell described herein is administered to a subject in combination with duvelisib and rituximab. Idelalisib (also called GS-1101 or CAL-101; Gilead) is a small molecule that blocks the delta isoform of PI3K. The structure of idelalisib (5-Fluoro-3-phenyl-2-[(1S)-1-(7H-purin-6-ylamino)propyl]-4(3H)-quinazolinone) is shown below.

[chemical structure]

[0862] Duvelisib (also called IPI-145; Infinity Pharmaceuticals and Abbvie) is a small molecule that blocks PI3K-δ,γ. The structure of duvelisib (8-Chloro-2-phenyl-3-[(1S)-1-(9H-purin-6-ylamino)ethyl]-1(2H)-isoquinolinone) is shown below.

[chemical structure]

[0863] In embodiments, the subject has CLL. In embodiments, the subject has relapsed CLL, e.g., the subject has previously been administered a cancer therapy (e.g., previously been administered an anti-CD20 antibody or previously been administered ibrutinib). For example, the subject has a deletion in the short arm of chromosome 17 (del(17p), e.g., in a leukemic cell). In other examples, the subject does not have a del(17p). In embodiments, the subject comprises a leukemic cell comprising a mutation in the immunoglobulin heavy-chain variable-region (IgV_{H}) gene. In other embodiments, the subject does not comprise a leukemic cell comprising a mutation in the immunoglobulin heavy-chain variable-region (IgV_{H}) gene. In embodiments, the subject has a deletion in the long arm of chromosome 11 (del(11q)). In other embodiments, the subject does not have a del(11q). In embodiments, idelalisib is administered at a dosage of about 100-400 mg (e.g., 100-125, 125-150, 150-175, 175-200, 200-225, 225-250, 250-275, 275-300, 325-350, 350-375, or 375-400 mg), e.g., BID. In embodiments, duvelisib is administered at a dosage of about 15-100 mg (e.g., about 15-25, 25-50, 50-75, or 75-100 mg), e.g., twice a day. In embodiments, rituximab is administered at a dosage of about 350-550 mg/m² (e.g., 350-375, 375-400, 400-425, 425-450, 450-475, or 475-500 mg/m²), e.g., intravenously.

[0864] In embodiments, a CAR-expressing cell described herein is administered to a subject in combination with an anaplastic lymphoma kinase (ALK) inhibitor. Exemplary ALK kinases include but are not limited to crizotinib (Pfizer), ceritinib (Novartis), alectinib (Chugai), brigatinib (also called AP26113; Ariad), entrectinib (Ignyta), PF-06463922 (Pfizer), TSR-011 (Tesaro) (see, e.g., Clinical Trial Identifier No. NCT02048488), CEP-37440 (Teva), and X-396 (Xcovery). In some embodiments, the subject has a solid cancer, e.g., a solid cancer described herein, e.g., lung cancer.

[0865] The chemical name of crizotinib is 3-[(1R)-1-(2,6-dichloro-3-fluorophenyl)ethoxy]-5-(1-piperidin-4-ylpyrazol-4-yl)pyridin-2-amine. The chemical name of ceritinib is 5-Chloro-N²-[2-isopropoxy-5-methyl-4-(4-piperidinyl)phenyl]-N⁴-[2-(isopropylsulfonyl)phenyl]-2,4-pyrimidinediamine. The chemical name of alectinib is 9-ethyl-6,6-dimethyl-8-(4-morpholinopiperidin-1-yl)-11-oxo-6,11-dihydro-5H-benzo[b]carbazole-3-carbonitrile. The chemical name of brigatinib is 5-Chloro-N²-{4-[4-(dimethylamino)-1-piperidinyl]-2-methoxyphenyl}-N⁴-[2-(dimethylphosphoryl)phenyl]-2,4-pyrimidinediamine. The chemical name of entrectinib is N-(5-(3,5-difluorobenzyl)-1H-indazol-3-yl)-4-(4-methylpiperazin-1-yl)-2-((tetrahydro-2H-pyran-4-yl)amino)benzamide. The chemical name of PF-06463922 is (10R)-7-Amino-12-fluoro-2,10,16-trimethyl-15-oxo-10,15,16,17-tetrahydro-2H-8,4-(metheno)pyrazolo[4,3-h][2,5,11]-benzoxadiazacyclotetradecine-3-carbonitrile. The chemical structure of CEP-37440 is (S)-2-((5-chloro-2-((6-(4-(2-hydroxyethyl)piperazin-1-yl)-1-methoxy-6,7,8,9-tetrahydro-5H-benzo[7]annulen-2-yl)amino)pyrimidin-4-yl)amino)-N-methylbenzamide. The chemical name of X-396 is (R)-6-amino-5-(1-(2,6-dichloro-3-fluorophenyl)ethoxy)-N-(4-(4-methylpiperazine-1-carbonyl)phenyl)pyridazine-3-carboxamide.

[0866] In one embodiment, the kinase inhibitor is a dual phosphatidylinositol 3-kinase (PI3K) and mTOR inhibitor selected from 2-Amino-8-[trans-4-(2-hydroxyethoxy)cyclohexyl]-6-(6-methoxy-3-pyridinyl)-4-methyl-pyrido[2,3-d]pyrimidin-7(8H)-one (PF-04691502); N-[4-[[4-(Dimethylamino)-1-piperidinyl]carbonyl]phenyl]-N′-[4-(4,6-di-4-morpholinyl-1,3,5-triazin-2-yl)phenyl]urea (PF-05212384, PKI-587); 2-Methyl-2-{4-[3-methyl-2-oxo-8-(quinolin-3-yl)-2,3-dihydro-1H-imidazo[4,5-c]quinolin-1-yl]phenyl}propanenitrile (BEZ-235); apitolisib (GDC-0980, RG7422); 2,4-Difluoro-N-{2-(methyloxy)-5-[4-(4-pyridazinyl)-6-quinolinyl]-3-pyridinyl}benzene sulfonamide (GSK2126458); 8-(6-methoxypyridin-3-yl)-3-methyl-1-(4-(piperazin-1-yl)-3-(trifluoromethyl)phenyl)-1H-imidazo[4,5-c]quinolin-2(3H)-one Maleic acid (NVP-BGT226); 3-[4-(4-Morpholinylpyrido[3′,2′:4,5]furo[3,2-d]pyrimidin-2-yl]phenol (PI-103); 5-(9-isopropyl-8-methyl-2-morpholino-9H-purin-6-yl)pyrimidin-2-amine (VS-5584, SB2343); and N-[2-[(3,5-Dimethoxyphenyl)amino]quinoxalin-3-yl]-4-[(4-methyl-3-methoxyphenyl)carbonyl]aminophenylsulfonamide (XL765).

[0867] Drugs that inhibit either the calcium dependent phosphatase calcineurin (cyclosporine and FK506) or inhibit the p70S6 kinase that is important for growth factor induced signaling (rapamycin). (Liu et al., Cell 66:807-815, 1991; Henderson et al., Immun 73:316-321, 1991; Bierer et al., Curr. Opin. Immun 5:763-773, 1993) can also be used. In a further aspect, the cell compositions of the present invention may be administered to a patient in conjunction with (e.g., before, simultaneously or following) bone marrow transplantation, T cell ablative therapy using chemotherapy agents such as, fludarabine, external-beam radiation therapy (XRT), cyclophosphamide, and/or antibodies such as OKT3 or CAMPATH. In one aspect, the cell compositions of the present invention are administered following B-cell ablative therapy such as agents that react with CD20, e.g., Rituxan. For example, in one embodiment, subjects may undergo standard treatment with high dose chemotherapy followed by peripheral blood stem cell transplantation. In certain embodiments, following the transplant, subjects receive an infusion of the expanded immune cells of the present invention. In an additional embodiment, expanded cells are administered before or following surgery.

[0868] In one embodiment, a CAR expressing cell described herein is administered to a subject in combination with a biphosphonate, e.g., Pamidronate (Aredia®); Zoledronic acid or Zoledronate (Zometa®, Zomera®, Aclasta®, or Reclast®); Alendronate (Fosamax®); Risedronate (Actonel®); Ibandronate (Boniva®); Clondronate (Bonefos®); Etidronate (Didronel®); Tiludronate (Skelid®); Pamidronate (Aredia®); Neridronate (Nerixia®); Strontiun ranelate (Protelos®, or Protos®); and Teriparatide (Forteo®).

[0869] In one embodiment, a CAR expressing cell described herein is administered to a subject in combination with a corticosteroid, e.g., dexamethasone (e.g., Decadron®), beclomethasone (e.g., Beclovent®), hydrocortisone (also known as cortisone, hydrocortisone sodium succinate, hydrocortisone sodium phosphate, and sold under the tradenames Ala-Cort®, hydrocortisone phosphate, Solu-Cortef®, Hydrocort Acetate® and Lanacort®), prednisolone (sold under the tradenames Delta-Cortel®, Orapred®, Pediapred® and Prelone®), prednisone (sold under the tradenames Deltasone®, Liquid Red®, Meticorten® and Orasone®), methylprednisolone (also known as 6-methylprednisolone, methylprednisolone acetate, methylprednisolone sodium succinate, sold under the tradenames Duralone®, Medralone®, Medrol®, M-Prednisol® and Solu-Medrol®); antihistamines, such as diphenhydramine (e.g., Benadryl®), hydroxyzine, and cyproheptadine; and bronchodilators, such as the beta-adrenergic receptor agonists, albuterol (e.g., Proventil®), and terbutaline (Brethine®).

[0870] In one embodiment, a CAR expressing cell described herein is administered to a subject in combination with an immunomodulator, e.g., Afutuzumab (available from Roche®); Pegfilgrastim (Neulasta®); Lenalidomide (CC-5013, Revlimid®); Thalidomide (Thalomid®), Actimid (CC4047); and IRX-2 (mixture of human cytokines including interleukin 1, interleukin 2, and interferon γ, CAS 951209-71-5, available from IRX Therapeutics.

[0871] In one embodiment, a CAR expressing cell described herein is administered to a subject in combination with a proteasome inhibitor, e.g., Bortezomib (Velcade®); Ixazomib citrate (MLN9708, CAS 1201902-80-8); Danoprevir (RG7227, CAS 850876-88-9); Ixazomib (MLN2238, CAS 1072833-77-2); and (S)—N-[(phenylmethoxy)carbonyl]-L-leucyl-N-(1-formyl-3-methylbutyl)-L-Leucinamide (MG-132, CAS 133407-82-6).

[0872] In one embodiment, a CAR expressing cell described herein is administered to a subject in combination with a vascular endothelial growth factor (VEGF) receptor, e.g., Bevacizumab (Avastin®), axitinib (Inlyta®); Brivanib alaninate (BMS-582664, (S)—((R)-1-(4-(4-Fluoro-2-methyl-1H-indol-5-yloxy)-5-methylpyrrolo[2,1-f][1,2,4]triazin-6-yloxy)propan-2-yl)2-aminopropanoate); Sorafenib (Nexavar®); Pazopanib (Votrient®); Sunitinib malate (Sutent®); Cediranib (AZD2171, CAS 288383-20-1); Vargatef (BIBF1120, CAS 928326-83-4); Foretinib (GSK1363089); Telatinib (BAY57-9352, CAS 332012-40-5); Apatinib (YN968D1, CAS 811803-05-1); Imatinib (Gleevec®); Ponatinib (AP24534, CAS 943319-70-8); Tivozanib (AV951, CAS 475108-18-0); Regorafenib (BAY73-4506, CAS 755037-03-7); Vatalanib dihydrochloride (PTK787, CAS 212141-51-0); Brivanib (BMS-540215, CAS 649735-46-6); Vandetanib (Caprelsa® or AZD6474); Motesanib diphosphate (AMG706, CAS 857876-30-3, N-(2,3-dihydro-3,3-dimethyl-1H-indol-6-yl)-2-[(4-pyridinylmethyl)amino]-3-pyridinecarboxamide, described in PCT Publication No. WO 02/066470); Dovitinib dilactic acid (TKI258, CAS 852433-84-2); Linfanib (ABT869, CAS 796967-16-3); Cabozantinib (XL184, CAS 849217-68-1); Lestaurtinib (CAS 111358-88-4); N-[5-[[[5-(1,1-Dimethylethyl)-2-oxazolyl]methyl]thio]-2-thiazolyl]-4-piperidinecarboxamide (BMS38703, CAS 345627-80-7); (3R,4R)-4-Amino-1-((4-((3-methoxyphenyl)amino)pyrrolo[2,1-f][1,2,4]triazin-5-yl)methyl)piperidin-3-ol (BMS690514); N-(3,4-Dichloro-2-fluorophenyl)-6-methoxy-7-[[(3aα,5β,6aα)-octahydro-2-methylcyclopenta[c]pyrrol-5-yl]methoxy]-4-quinazolinamine (XL647, CAS 781613-23-8); 4-Methyl-3-[[1-methyl-6-(3-pyridinyl)-1H-pyrazolo[3,4-d]pyrimidin-4-yl]amino]-N-[3-(trifluoromethyl)phenyl]-benzamide (BHG712, CAS 940310-85-0); and Aflibercept (Eylea®).

[0873] In one embodiment, a CAR expressing cell described herein is administered to a subject in combination with a CD20 antibody or a conjugate thereof, e.g., Rituximab (Riuxan® and MabThera®); and Tositumomab (Bexxar®); and Ofatumumab (Arzerra®), Ibritumomab tiuxetan (Zevalin®); and Tositumomab,

[0874] In one embodiment, a CAR expressing cell described herein is administered to a subject in combination with an anticonvulsant, e.g., Anticonvulsants (antiepileptic or antiseizure drugs): aldehydes, e.g., paraldehyde; aromatic allylic alcohols, e.g., stiripentol (Diacomit®); barbiturates, e.g., phenobarbital (Luminal®), methylphenobarbital (Mebaral®), barbexaclone (Maliasin®), benzodiazepines, e.g., clobazam (Onfi®), clonazepam (Klonopin®), clorazepate (Tranxene® and Novo-Clopate®), diazepam (Valium®, Lembrol®, Diastat®), midazolam (Versed®), lorazepam (Ativan® and Orfidal®), nitrazepam (Alodorm®, Arem®, Insoma®), temazepam (Restoril®, Normison®), nimetzepam (Erimin®), bromides, e.g., potassium bromide; carbamates, e.g., felbamate (Felbatol®); carboxamides, e.g., carbamazepine (Tegretol®, Equetro®), oxcarbazepine (Trileptal®, Oxcarb®), eslicarbazepine acetate (Aptiom®); fatty acids, e.g., valproates (valproic acid, sodium valproate, divalproex sodium), vigabatrin (Sabril®), progabide (Gabren®), tiagabine (Gabitril®); fructose derivatives, e.g., topiramate (Topamax®); GABA analogs, e.g., gabapentin (Neurontin®), pregabalin (Lyrica®); hydantoins, e.g., ethotoin (Peganone®), phenytoin (Dilantin®), mephenytoin (Mesantoin®), fosphenytoin (Cerebyx®, Prodilantin®); oxazolidinediones, e.g., paramethadione (Paradione®), trimethadione (Tridione®); propionates, e.g., beclamide (Choracon®, Hibicon®, Posedrine®); pyrimidinediones, e.g., primidone (Mysoline®); pyrrolidines, e.g., brivaracetam, levetiracetam, seletracetam (Keppra®); succinimides, e.g., ethosuximide (Zarontin®), phensuximide (Milontin®), mesuximide (Celontin®, Petinutin®); sulfonamides, e.g., acetazolamide (Diamox®), sultiame (Ospolot®), methazolamide (Neptazane®), zonisamide (Zonegran®); triazines, e.g., lamotrigine (Lamictal®); ureas, e.g., pheneturide, phenacemide (Phenurone®); valproylamides (amide derivaties of valproate), e.g., valpromide (Depamide®), valnoctamide; AMPA receptor antagonist, e.g., perampanel (Fycompa®).

[0875] In embodiments, a CAR-expressing cell described herein is administered to a subject in combination with an indoleamine 2,3-dioxygenase (IDO) inhibitor. IDO is an enzyme that catalyzes the degradation of the amino acid, L-tryptophan, to kynurenine. Many cancers overexpress IDO, e.g., prostatic, colorectal, pancreatic, cervical, gastric, ovarian, head, and lung cancer. pDCs, macrophages, and dendritic cells (DCs) can express IDO. Without being bound by theory, it is thought that a decrease in L-tryptophan (e.g., catalyzed by IDO) results in an immunosuppressive milieu by inducing T-cell anergy and apoptosis. Thus, without being bound by theory, it is thought that an IDO inhibitor can enhance the efficacy of a CAR-expressing cell described herein, e.g., by decreasing the suppression or death of a CAR-expressing immune cell. In embodiments, the subject has a solid tumor, e.g., a solid tumor described herein, e.g., prostatic, colorectal, pancreatic, cervical, gastric, ovarian, head, or lung cancer. Exemplary inhibitors of IDO include but are not limited to 1-methyl-tryptophan, indoximod (NewLink Genetics) (see, e.g., Clinical Trial Identifier Nos. NCT01191216; NCT01792050), and INCB024360 (Incyte Corp.) (see, e.g., Clinical Trial Identifier Nos. NCT01604889; NCT01685255)

[0876] In embodiments, a CAR-expressing cell described herein is administered to a subject in combination with a modulator of myeloid-derived suppressor cells (MDSCs). MDSCs accumulate in the periphery and at the tumor site of many solid tumors. These cells suppress T cell responses, thereby hindering the efficacy of CAR-expressing cell therapy. Without being bound by theory, it is thought that administration of a MDSC modulator enhances the efficacy of a CAR-expressing cell described herein. In an embodiment, the subject has a solid tumor, e.g., a solid tumor described herein, e.g., glioblastoma. Exemplary modulators of MDSCs include but are not limited to MCS110 and BLZ945. MCS110 is a monoclonal antibody (mAb) against macrophage colony-stimulating factor (M-CSF). See, e.g., Clinical Trial Identifier No. NCT00757757. BLZ945 is a small molecule inhibitor of colony stimulating factor 1 receptor (CSF1R). See, e.g., Pyonteck et al. Nat. Med. 19(2013):1264-72. The structure of BLZ945 is shown below.

[chemical structure]

[0877] In embodiments, a CAR-expressing cell described herein is administered to a subject in combination with a CD19 CART cell (e.g., CTL019, e.g., as described in WO2012/079000, incorporated herein by reference). In embodiments, the subject has acute myeloid leukemia (AML), e.g., a CD19 positive AML or a CD19 negative AML. In embodiments, the subject has a CD19+ lymphoma, e.g., a CD19+ Non-Hodgkin's Lymphoma (NHL), a CD19+ FL, or a CD19+ DLBCL. In embodiments, the subject has a relapsed or refractory CD19+ lymphoma. In embodiments, a lymphodepleting chemotherapy is administered to the subject prior to, concurrently with, or after administration (e.g., infusion) of CD19 CART cells. In an example, the lymphodepleting chemotherapy is administered to the subject prior to administration of CD19 CART cells. For example, the lymphodepleting chemotherapy ends 1-4 days (e.g., 1, 2, 3, or 4 days) prior to CD19 CART cell infusion. In embodiments, multiple doses of CD19 CART cells are administered, e.g., as described herein. For example, a single dose comprises about 5×10⁸ CD19 CART cells. In embodiments, a lymphodepleting chemotherapy is administered to the subject prior to, concurrently with, or after administration (e.g., infusion) of a CAR-expressing cell described herein, e.g., a non-CD19 CAR-expressing cell. In embodiments, a CD19 CART is administered to the subject prior to, concurrently with, or after administration (e.g., infusion) of a non-CD19 CAR-expressing cell, e.g., a non-CD19 CAR-expressing cell described herein.

[0878] In some embodiments, a CAR-expressing cell described herein is administered to a subject in combination with a CD19 CAR-expressing cell, e.g., CTL019, e.g., as described in WO2012/079000, incorporated herein by reference, for treatment of a disease associated with the expression of BCMA, e.g., a cancer described herein. Without being bound by theory, it is believed that administering a CD19 CAR-expressing cell in combination with a CAR-expressing cell improves the efficacy of a CAR-expressing cell described herein by targeting early lineage cancer cells, e.g., cancer stem cells, modulating the immune response, depleting regulatory B cells, and/or improving the tumor microenvironment. For example, a CD19 CAR-expressing cell targets cancer cells that express early lineage markers, e.g., cancer stem cells and CD19-expressing cells, while the CAR-expressing cell described herein targets cancer cells that express later lineage markers, e.g., BCMA. This preconditioning approach can improve the efficacy of the CAR-expressing cell described herein. In such embodiments, the CD19 CAR-expressing cell is administered prior to, concurrently with, or after administration (e.g., infusion) of a CAR-expressing cell described herein.

[0879] In embodiments, a CAR-expressing cell described herein also expresses a CAR targeting CD19, e.g., a CD19 CAR. In an embodiment, the cell expressing a CAR described herein and a CD19 CAR is administered to a subject for treatment of a cancer described herein, e.g., AML. In an embodiment, the configurations of one or both of the CAR molecules comprise a primary intracellular signaling domain and a costimulatory signaling domain. In another embodiment, the configurations of one or both of the CAR molecules comprise a primary intracellular signaling domain and two or more, e.g., 2, 3, 4, or 5 or more, costimulatory signaling domains. In such embodiments, the CAR molecule described herein and the CD19 CAR may have the same or a different primary intracellular signaling domain, the same or different costimulatory signaling domains, or the same number or a different number of costimulatory signaling domains. Alternatively, the CAR described herein and the CD19 CAR are configured as a split CAR, in which one of the CAR molecules comprises an antigen binding domain and a costimulatory domain (e.g., 4-1BB), while the other CAR molecule comprises an antigen binding domain and a primary intracellular signaling domain (e.g., CD3 zeta).

[0880] In some embodiments, a CAR-expressing cell described herein is administered to a subject in combination with a interleukin-15 (IL-15) polypeptide, a interleukin-15 receptor alpha (IL-15Ra) polypeptide, or a combination of both a IL-15 polypeptide and a IL-15Ra polypeptide e.g., hetIL-15 (Admune Therapeutics, LLC). hetIL-15 is a heterodimeric non-covalent complex of IL-15 and IL-15Ra. hetIL-15 is described in, e.g., U.S. Pat. No. 8,124,084, U.S. 2012/0177598, U.S. 2009/0082299, U.S. 2012/0141413, and U.S. 2011/0081311, incorporated herein by reference. In embodiments, het-IL-15 is administered subcutaneously. In embodiments, the subject has a cancer, e.g., solid cancer, e.g., melanoma or colon cancer. In embodiments, the subject has a metastatic cancer.

[0881] In one embodiment, the subject can be administered an agent which reduces or ameliorates a side effect associated with the administration of a CAR-expressing cell. Side effects associated with the administration of a CAR-expressing cell include, but are not limited to CRS, and hemophagocytic lymphohistiocytosis (HLH), also termed Macrophage Activation Syndrome (MAS). Symptoms of CRS include high fevers, nausea, transient hypotension, hypoxia, and the like. CRS may include clinical constitutional signs and symptoms such as fever, fatigue, anorexia, myalgias, arthalgias, nausea, vomiting, and headache. CRS may include clinical skin signs and symptoms such as rash. CRS may include clinical gastrointestinal signs and symsptoms such as nausea, vomiting and diarrhea. CRS may include clinical respiratory signs and symptoms such as tachypnea and hypoxemia. CRS may include clinical cardiovascular signs and symptoms such as tachycardia, widened pulse pressure, hypotension, increased cardac output (early) and potentially diminished cardiac output (late). CRS may include clinical coagulation signs and symptoms such as elevated d-dimer, hypofibrinogenemia with or without bleeding. CRS may include clinical renal signs and symptoms such as azotemia. CRS may include clinical hepatic signs and symptoms such as transaminitis and hyperbilirubinemia. CRS may include clinical neurologic signs and symptoms such as headache, mental status changes, confusion, delirium, word finding difficulty or frank aphasia, hallucinations, tremor, dymetria, altered gait, and seizures.

[0882] Accordingly, the methods described herein can comprise administering a CAR-expressing cell described herein to a subject and further administering one or more agents to manage elevated levels of a soluble factor resulting from treatment with a CAR-expressing cell. In one embodiment, the soluble factor elevated in the subject is one or more of IFN-γ, TNFα, IL-2 and IL-6. In an embodiment, the factor elevated in the subject is one or more of IL-1, GM-CSF, IL-10, IL-8, IL-5 and fraktalkine. Therefore, an agent administered to treat this side effect can be an agent that neutralizes one or more of these soluble factors. In one embodiment, the agent that neutralizes one or more of these soluble forms is an antibody or antibody fragment. Examples of such agents include, but are not limited to a steroid (e.g., corticosteroid), an inhibitor of TNFα, and an inhibitor of IL-6. An example of a TNFα inhibitor is an anti-TNFα antibody molecule such as, infliximab, adalimumab, certolizumab pegol, and golimumab. Another example of a TNFα inhibitor is a fusion protein such as entanercept. Small molecule inhibitors of TNFα include, but are not limited to, xanthine derivatives (e.g. pentoxifylline) and bupropion. An example of an IL-6 inhibitor is an anti-IL-6 antibody molecule such as tocilizumab (toc), sarilumab, elsilimomab, CNTO 328, ALD518/BMS-945429, CNTO 136, CPSI-2364, CDP6038, VX30, ARGX-109, FE301, and FM101. In one embodiment, the anti-IL-6 antibody molecule is tocilizumab. An example of an IL-1R based inhibitor is anakinra.

[0883] In some embodiment, the subject is administered a corticosteroid, such as, e.g., methylprednisolone, hydrocortisone, among others.

[0884] In some embodiments, the subject is administered a vasopressor, such as, e.g., norepinephrine, dopamine, phenylephrine, epinephrine, vasopressin, or a combination thereof.

[0885] In an embodiment, the subject can be administered an antipyretic agent. In an embodiment, the subject can be administered an analgesic agent.

[0886] In one embodiment, the subject can be administered an agent that prevents trafficking of the BCMA CAR-expressing cell to the brain, e.g., natalizumab (TYSABRI®). BCMA expression, e.g., a splice variant thereof, has been detected in some parts of the brain, e.g., the cerebellum or medulla oblongata. Without being bound by any particular theory, prevention of trafficking of the BCMA CAR-expressing cells to the brain is preferred to prevent any BCMA CAR-expressing cells from interacting with or acting on BCMA-expressing brain tissue.

[0887] In one embodiment, the subject can be administered an agent which enhances the activity of a CAR-expressing cell. For example, in one embodiment, the agent can be an agent which inhibits an inhibitory molecule, e.g., the agent is a checkpoint inhibitor. Inhibitory molecules, e.g., Programmed Death 1 (PD1), can, in some embodiments, decrease the ability of a CAR-expressing cell to mount an immune effector response. Examples of inhibitory molecules include PD1, PD-L1, PD-L2, CTLA4, TIM3, CEACAM (e.g., CEACAM-1, CEACAM-3 and/or CEACAM-5), LAG3, VISTA, BTLA, TIGIT, LAIR1, CD160, 2B4, CD80, CD86, B7-H3 (CD276), B7-H4 (VTCN1), HVEM (TNFRSF14 or CD270), KIR, A2aR, MHC class I, MHC class II, GALS, adenosine, and TGFR beta. Inhibition of an inhibitory molecule, e.g., by inhibition at the DNA, RNA or protein level, can optimize a CAR-expressing cell performance. In embodiments, an inhibitory nucleic acid, e.g., an inhibitory nucleic acid, e.g., a dsRNA, e.g., an siRNA or shRNA, a clustered regularly interspaced short palindromic repeats (CRISPR), a transcription-activator like effector nuclease (TALEN), or a zinc finger endonuclease (ZFN), e.g., as described herein, can be used to inhibit expression of an inhibitory molecule in the CAR-expressing cell. In an embodiment the inhibitor is an shRNA. In an embodiment, the inhibitory molecule is inhibited within a CAR-expressing cell. In these embodiments, a dsRNA molecule that inhibits expression of the inhibitory molecule is linked to the nucleic acid that encodes a component, e.g., all of the components, of the CAR. In embodiments, a CAR-expressing cell described herein is administered in combination with an inhibitor of an inhibitory molecule, e.g., in combination with a checkpoint inhibitor, e.g., in combination with an inhibitor of PD1 and/or PD-L1. In embodiments, a CAR-expressing cell described herein is administered in combination with an inhibitor of PD1. In embodiments, a CAR-expressing cell described herein is administered in combination with an inhibitor of PD-L1.

[0888] In an embodiment, a nucleic acid molecule that encodes a dsRNA molecule that inhibits expression of the molecule that modulates or regulates, e.g., inhibits, T-cell function is operably linked to a promoter, e.g., a H1- or a U6-derived promoter such that the dsRNA molecule that inhibits expression of the molecule that modulates or regulates, e.g., inhibits, T-cell function is expressed, e.g., is expressed within a CAR-expressing cell. See e.g., Tiscornia G., “Development of Lentiviral Vectors Expressing siRNA,” Chapter 3, in Gene Transfer: Delivery and Expression of DNA and RNA (eds. Friedmann and Rossi). Cold Spring Harbor Laboratory Press, Cold Spring Harbor, N.Y., USA, 2007; Brummelkamp T R, et al. (2002) Science 296: 550-553; Miyagishi M, et al. (2002) Nat. Biotechnol. 19: 497-500. In an embodiment the nucleic acid molecule that encodes a dsRNA molecule that inhibits expression of the molecule that modulates or regulates, e.g., inhibits, T-cell function is present on the same vector, e.g., a lentiviral vector, that comprises a nucleic acid molecule that encodes a component, e.g., all of the components, of the CAR. In such an embodiment, the nucleic acid molecule that encodes a dsRNA molecule that inhibits expression of the molecule that modulates or regulates, e.g., inhibits, T-cell function is located on the vector, e.g., the lentiviral vector, 5′- or 3′- to the nucleic acid that encodes a component, e.g., all of the components, of the CAR. The nucleic acid molecule that encodes a dsRNA molecule that inhibits expression of the molecule that modulates or regulates, e.g., inhibits, T-cell function can be transcribed in the same or different direction as the nucleic acid that encodes a component, e.g., all of the components, of the CAR. In an embodiment the nucleic acid molecule that encodes a dsRNA molecule that inhibits expression of the molecule that modulates or regulates, e.g., inhibits, T-cell function is present on a vector other than the vector that comprises a nucleic acid molecule that encodes a component, e.g., all of the components, of the CAR. In an embodiment, the nucleic acid molecule that encodes a dsRNA molecule that inhibits expression of the molecule that modulates or regulates, e.g., inhibits, T-cell function it transiently expressed within a CAR-expressing cell. In an embodiment, the nucleic acid molecule that encodes a dsRNA molecule that inhibits expression of the molecule that modulates or regulates, e.g., inhibits, T-cell function is stably integrated into the genome of a CAR-expressing cell.

[0889] Examples of dsRNA molecules useful for inhibiting expression of a molecule that modulates or regulates, e.g., inhibits, T-cell function, wherein the molecule that modulates or regulates, e.g., inhibits, T-cell function is PD-1 are provided below.

[0890] Provided in Table 18 below are the names of PDCD1 (PD1) RNAi agents (derived from their position in the mouse PDCD1 gene sequence NM_008798.2), along with the SEQ ID NOs: 286-333 representing the DNA sequence. Both sense (S) and antisense (AS) sequences are presented as 19mer and 21mer sequences are in this table. Also note that the position (PoS, e.g., 176) is derived from the position number in the mouse PDCD1 gene sequence NM_008798.2. SEQ ID NOs are indicated in groups of 12 that correspond with “sense 19” SEQ ID NOs: 286-297; “sense 21” SEQ ID NOs: 298-309; “asense 21” SEQ ID NOs: 310-321; “asense 19” SEQ ID NOs: 322-333.

TABLE 18
Mouse PDCD1 (PD1) shRNA sequences

| Position | | | | | |
|---|---|---|---|---|---|
| on | Target | | | | |
| NM_008798.2 | region | Sense19 | Sense21 | Asense21 | Asense19 |
| 176 | CDS | GGAGGTCCCT | CTGGAGGTCC | TAGAAGGTGA | TAGAAGGTGA |
| | | CACCTTCTA | CTCACCTTCTA | GGGACCTCCAG | GGGACCTCC |
| | | (SEQ ID NO: | (SEQ ID NO: | (SEQ ID NO: | (SEQ ID NO: |
| | | 286) | 298) | 310) | 322) |
| 260 | CDS | CGGAGGATCT | GTCGGAGGAT | TTCAGCATAA | TTCAGCATAA |
| | | TATGCTGAA | CTTATGCTGAA | GATCCTCCGAC | GATCCTCCG |
| | | (SEQ ID NO: | (SEQ ID NO: | (SEQ ID NO: | (SEQ ID NO: |
| | | 287) | 299) | 311) | 323) |
| 359 | CDS | CCCGCTTCCA | TGCCCGCTTC | TGTATGATCT | TGTATGATCT |
| | | GATCATACA | CAGATCATACA | GGAAGCGGGCA | GGAAGCGGG |
| | | (SEQ ID NO: | (SEQ ID NO: | (SEQ ID NO: | (SEQ ID NO: |
| | | 288) | 300) | 312) | 324) |
| 528 | CDS | GGAGACCTCA | CTGGAGACCT | ATATCTTGTT | ATATCTTGTT |
| | | ACAAGATAT | CAACAAGATAT | GAGGTCTCCAG | GAGGTCTCC |
| | | (SEQ ID NO: | (SEQ ID NO: | (SEQ ID NO: | (SEQ ID NO: |
| | | 289) | 301) | 313) | 325) |
| 581 | CDS | AAGGCATGGT | TCAAGGCATG | ATACCAATGA | ATACCAATGA |
| | | CATTGGTAT | GTCATTGGTAT | CCATGCCTTGA | CCATGCCTT |
| | | (SEQ ID NO: | (SEQ ID NO: | (SEQ ID NO: | (SEQ ID NO: |
| | | 290) | 302) | 314) | 326) |
| 584 | CDS | GCATGGTCAT | AGGCATGGTC | ATGATACCAA | ATGATACCAA |
| | | TGGTATCAT | ATTGGTATCAT | TGACCATGCCT | TGACCATGC |
| | | (SEQ ID NO: | (SEQ ID NO: | (SEQ ID NO: | (SEQ ID NO: |
| | | 291) | 303) | 315) | 327) |
| 588 | CDS | GGTCATTGGT | ATGGTCATTG | ATGGTCATTG | ATGGTCATTG |
| | | ATCATGAGT | GTATCATGAGT | GTATCATGAGT | GTATCATGA |
| | | (SEQ ID NO: | (SEQ ID NO: | (SEQ ID NO: | (SEQ ID NO: |
| | | 292) | 304) | 316) | 328) |
| 609 | CDS | CCTAGTGGGT | GCCCTAGTGG | GCCCTAGTGG | GCCCTAGTGG |
| | | ATCCCTGTA | GTATCCCTGTA | GTATCCCTGTA | GTATCCCTG |
| | | (SEQ ID NO: | (SEQ ID NO: | (SEQ ID NO: | (SEQ ID NO: |
| | | 293) | 305) | 317) | 329) |
| 919 | CDS | GAGGATGGAC | ATGAGGATGG | ATGAGGATGG | ATGAGGATGG |
| | | ATTGTTCTT | ACATTGTTCTT | ACATTGTTCTT | ACATTGTTC |
| | | (SEQ ID NO: | (SEQ ID NO: | (SEQ ID NO: | (SEQ ID NO: |
| | | 294) | 306) | 318) | 330) |
| 1021 | 3′UTR | GCATGCAGGC | GAGCATGCAG | GAGCATGCAG | GAGCATGCAG |
| | | TACAGTTCA | GCTACAGTTCA | GCTACAGTTCA | GCTACAGTT |
| | | (SEQ ID NO: | (SEQ ID NO: | (SEQ ID NO: | (SEQ ID NO: |
| | | 295) | 307) | 319) | 331) |
| 1097 | 3′UTR | CCAGCACATG | TTCCAGCACA | TTCCAGCACA | TTCCAGCACA |
| | | CACTGTTGA | TGCACTGTTGA | TGCACTGTTGA | TGCACTGTT |
| | | (SEQ ID NO: | (SEQ ID NO: | (SEQ ID NO: | (SEQ ID NO: |
| | | 296) | 308) | 320) | 332) |
| 1101 | 3′UTR | CACATGCACT | AGCACATGCA | AGCACATGCA | AGCACATGCA |
| | | GTTGAGTGA | CTGTTGAGTGA | CTGTTGAGTGA | CTGTTGAGT |
| | | (SEQ ID NO: | (SEQ ID NO: | (SEQ ID NO: | (SEQ ID NO: |
| | | 297) | 309) | 321) | 333) |

[0891] Provided in Table 19 below are the names of PDCD1 (PD1) RNAi agents (derived from their position in the human PDCD1 gene sequence, along with the SEQ ID NOs. 334-381 representing the DNA sequence. Both sense (S) and antisense (AS) sequences are presented as 19mer and 21mer sequences. SEQ ID NOs are indicated in groups of 12 that correspond with “sense 19” SEQ ID NOs: 334-345; “sense 21” SEQ ID NOs: 346-357; “asense 21” SEQ ID NOs: 358-369; “asense 19” SEQ ID NOs: 370-381.

TABLE 19
Human PDCD1 (PD1) shRNA sequences

| Position | | | | | |
|---|---|---|---|---|---|
| on | Target | | | | |
| NM_005018.2 | region | Sense19 | Sense19 | Asense21 | Asense21 |
| 145 | CDS | GGCCAGGATG | TCTAAGAACC | GCGGCCAGGA | TCTAAGAACC |
| | | GTTCTTAGA | ATCCTGGCC | TGGTTCTTAGA | ATCCTGGCCGC |
| | | (SEQ ID NO: | (SEQ ID NO: | (SEQ ID NO: | (SEQ ID NO: |
| | | 334) | 346) | 358) | 370) |
| 271 | CDS | GCTTCGTGCT | TACCAGTTTA | GAGCTTCGTG | TACCAGTTTA |
| | | AAACTGGTA | GCACGAAGC | CTAAACTGGTA | GCACGAAGCTC |
| | | (SEQ ID NO: | (SEQ ID NO: | (SEQ ID NO: | (SEQ ID NO: |
| | | 335) | 347) | 359) | 371) |
| 393 | CDS | GGGCGTGACT | TCATGTGGAA | ACGGGCGTGA | TCATGTGGAA |
| | | TCCACATGA | GTCACGCCC | CTTCCACATGA | GTCACGCCCGT |
| | | (SEQ ID NO: | (SEQ ID NO: | (SEQ ID NO: | (SEQ ID NO: |
| | | 336) | 348) | 360) | 372) |
| 1497 | 3′UTR | CAGGCCTAGA | TGAAACTTCT | TGCAGGCCTA | TGAAACTTCT |
| | | GAAGTTTCA | CTAGGCCTG | GAGAAGTTTCA | CTAGGCCTGCA |
| | | (SEQ ID NO: | (SEQ ID NO: | (SEQ ID NO: | (SEQ ID NO: |
| | | 337) | 349) | 361) | 373) |
| 1863 | 3′UTR | CTTGGAACCC | TTCAGGAATG | TCCTTGGAAC | TTCAGGAATG |
| | | ATTCCTGAA | GGTTCCAAG | CCATTCCTGAA | GGTTCCAAGGA |
| | | (SEQ ID NO: | (SEQ ID NO: | (SEQ ID NO: | (SEQ ID NO: |
| | | 338) | 350) | 362) | 374) |
| 1866 | 3′UTR | GGAACCCATT | AATTTCAGGA | TTGGAACCCA | AATTTCAGGA |
| | | CCTGAAATT | ATGGGTTCC | TTCCTGAAATT | ATGGGTTCCAA |
| | | (SEQ ID NO: | (SEQ ID NO: | (SEQ ID NO: | (SEQ ID NO: |
| | | 339) | 351) | 363) | 375) |
| 1867 | 3′UTR | GAACCCATTC | TAATTTCAGG | TGGAACCCAT | TAATTTCAGG |
| | | CTGAAATTA | AATGGGTTC | TCCTGAAATTA | AATGGGTTCCA |
| | | (SEQ ID NO: | (SEQ ID NO: | (SEQ ID NO: | (SEQ ID NO: |
| | | 340) | 352) | 364) | 376) |
| 1868 | 3′UTR | AACCCATTCC | ATAATTTCAG | GGAACCCATT | ATAATTTCAG |
| | | TGAAATTAT | GAATGGGTT | CCTGAAATTAT | GAATGGGTTCC |
| | | (SEQ ID NO: | (SEQ ID NO: | (SEQ ID NO: | (SEQ ID NO: |
| | | 341) | 353) | 365) | 377) |
| 1869 | 3′UTR | ACCCATTCCT | AATAATTTCA | GAACCCATTC | AATAATTTCA |
| | | GAAATTATT | GGAATGGGT | CTGAAATTATT | GGAATGGGTTC |
| | | (SEQ ID NO: | (SEQ ID NO: | (SEQ ID NO: | (SEQ ID NO: |
| | | 342) | 354) | 366) | 378) |
| 1870 | 3′UTR | CCCATTCCTG | AAATAATTTC | AACCCATTCC | AAATAATTTC |
| | | AAATTATTT | AGGAATGGG | TGAAATTATTT | AGGAATGGGTT |
| | | (SEQ ID NO: | (SEQ ID NO: | (SEQ ID NO: | (SEQ ID NO: |
| | | 343) | 355) | 367) | 379) |
| 2079 | 3′UTR | CTGTGGTTCT | TAATATAATA | CCCTGTGGTT | TAATATAATA |
| | | ATTATATTA | GAACCACAG | CTATTATATTA | GAACCACAGGG |
| | | (SEQ ID NO: | (SEQ ID NO: | (SEQ ID NO: | (SEQ ID NO: |
| | | 344) | 356) | 368) | 380) |
| 2109 | 3′UTR | AAATATGAGA | TTAGCATGCT | TTAAATATGA | TTAGCATGCT |
| | | GCATGCTAA | CTCATATTT | GAGCATGCTAA | CTCATATTTAA |
| | | (SEQ ID NO: | (SEQ ID NO: | (SEQ ID NO: | (SEQ ID NO: |
| | | 345) | 357) | 369) | 381) |

[0892] In one embodiment, the inhibitor of an inhibitory signal can be, e.g., an antibody or antibody fragment that binds to an inhibitory molecule. For example, the agent can be an antibody or antibody fragment that binds to PD1, PD-L1, PD-L2 or CTLA4 (e.g., ipilimumab (also referred to as MDX-010 and MDX-101, and marketed as Yervoy®; Bristol-Myers Squibb; Tremelimumab (IgG2 monoclonal antibody available from Pfizer, formerly known as ticilimumab, CP-675,206).). In an embodiment, the agent is an antibody or antibody fragment that binds to TIM3. In an embodiment, the agent is an antibody or antibody fragment that binds to LAG3. In embodiments, the agent that enhances the activity of a CAR-expressing cell, e.g., inhibitor of an inhibitory molecule, is administered in combination with an allogeneic CAR, e.g., an allogeneic CAR described herein (e.g., described in the Allogeneic CAR section herein).

[0893] PD-1 is an inhibitory member of the CD28 family of receptors that also includes CD28, CTLA-4, ICOS, and BTLA. PD-1 is expressed on activated B cells, T cells and myeloid cells (Agata et al. 1996 Int. Immunol 8:765-75). Two ligands for PD-1, PD-L1 and PD-L2 have been shown to downregulate T cell activation upon binding to PD-1 (Freeman et a. 2000 J Exp Med 192:1027-34; Latchman et al. 2001 Nat Immunol 2:261-8; Carter et al. 2002 Eur J Immunol 32:634-43). PD-L1 is abundant in human cancers (Dong et al. 2003 J Mol Med 81:281-7; Blank et al. 2005 Cancer Immunol. Immunother 54:307-314; Konishi et al. 2004 Clin Cancer Res 10:5094) Immune suppression can be reversed by inhibiting the local interaction of PD-1 with PD-L1. Antibodies, antibody fragments, and other inhibitors of PD-1, PD-L1 and PD-L2 are available in the art and may be used combination with a cars of the present invention described herein. For example, nivolumab (also referred to as BMS-936558 or MDX1106; Bristol-Myers Squibb) is a fully human IgG4 monoclonal antibody which specifically blocks PD-1. Nivolumab (clone 5C4) and other human monoclonal antibodies that specifically bind to PD-1 are disclosed in U.S. Pat. No. 8,008,449 and WO2006/121168. Pidilizumab (CT-011; Cure Tech) is a humanized IgGlk monoclonal antibody that binds to PD-1. Pidilizumab and other humanized anti-PD-1 monoclonal antibodies are disclosed in WO2009/101611. Pembrolizumab (formerly known as lambrolizumab, and also referred to as MK03475; Merck) is a humanized IgG4 monoclonal antibody that binds to PD-1. Pembrolizumab and other humanized anti-PD-1 antibodies are disclosed in U.S. Pat. No. 8,354,509 and WO2009/114335. MEDI4736 (Medimmune) is a human monoclonal antibody that binds to PDL1, and inhibits interaction of the ligand with PD1. MDPL3280A (Genentech/Roche) is a human Fc optimized IgG1 monoclonal antibody that binds to PD-L1. MDPL3280A and other human monoclonal antibodies to PD-L1 are disclosed in U.S. Pat. No. 7,943,743 and U.S. Publication No.: 20120039906. Other anti-PD-L1 binding agents include YW243.55.570 (heavy and light chain variable regions are shown in SEQ ID NOs 20 and 21 in WO2010/077634) and MDX-1 105 (also referred to as BMS-936559, and, e.g., anti-PD-L1 binding agents disclosed in WO2007/005874). AMP-224 (B7-DCIg; Amplimmune; e.g., disclosed in WO2010/027827 and WO2011/066342), is a PD-L2 Fc fusion soluble receptor that blocks the interaction between PD-1 and B7-H1. Other anti-PD-1 antibodies include AMP 514 (Amplimmune), among others, e.g., anti-PD-1 antibodies disclosed in U.S. Pat. No. 8,609,089, US 2010028330, and/or US 20120114649.

[0894] TIM3 (T cell immunoglobulin-3) also negatively regulates T cell function, particularly in IFN-g-secreting CD4+ T helper 1 and CD8+ T cytotoxic 1 cells, and plays a critical role in T cell exhaustion. Inhibition of the interaction between TIM3 and its ligands, e.g., galectin-9 (Gal9), phosphotidylserine (PS), and HMGB1, can increase immune response. Antibodies, antibody fragments, and other inhibitors of TIM3 and its ligands are available in the art and may be used combination with a CD19 or BCMA CAR described herein. For example, antibodies, antibody fragments, small molecules, or peptide inhibitors that target TIM3 binds to the IgV domain of TIM3 to inhibit interaction with its ligands. Antibodies and peptides that inhibit TIM3 are disclosed in WO2013/006490 and US20100247521. Other anti-TIM3 antibodies include humanized versions of RMT3-23 (disclosed in Ngiow et al., 2011, Cancer Res, 71:3540-3551), and clone 8B.2C12 (disclosed in Monney et al., 2002, Nature, 415:536-541). Bi-specific antibodies that inhibit TIM3 and PD-1 are disclosed in US20130156774.

[0895] In other embodiments, the agent which enhances the activity of a CAR-expressing cell is a CEACAM inhibitor (e.g., CEACAM-1, CEACAM-3, and/or CEACAM-5 inhibitor). In one embodiment, the inhibitor of CEACAM is an anti-CEACAM antibody molecule. Exemplary anti-CEACAM-1 antibodies are described in WO 2010/125571, WO 2013/082366 WO 2014/059251 and WO 2014/022332, e.g., a monoclonal antibody 34B1, 26H7, and 5F4; or a recombinant form thereof, as described in, e.g., US 2004/0047858, U.S. Pat. No. 7,132,255 and WO 99/052552. In other embodiments, the anti-CEACAM antibody binds to CEACAM-5 as described in, e.g., Zheng et al. PLoS One. 2010 Sep. 2; 5(9). pii: e12529 (DOI:10:1371/journal.pone.0021146), or crossreacts with CEACAM-1 and CEACAM-5 as described in, e.g., WO 2013/054331 and US 2014/0271618.

[0896] Without wishing to be bound by theory, carcinoembryonic antigen cell adhesion molecules (CEACAM), such as CEACAM-1 and CEACAM-5, are believed to mediate, at least in part, inhibition of an anti-tumor immune response (see e.g., Markel et al. J Immunol. 2002 Mar. 15; 168(6):2803-10; Markel et al. J Immunol. 2006 Nov. 1; 177(9):6062-71; Markel et al. Immunology. 2009 February; 126(2):186-200; Markel et al. Cancer Immunol Immunother. 2010 February; 59(2):215-30; Ortenberg et al. Mol Cancer Ther. 2012 June; 11(6):1300-10; Stern et al. J Immunol. 2005 Jun. 1; 174(11):6692-701; Zheng et al. PLoS One. 2010 Sep. 2; 5(9). pii: e12529). For example, CEACAM-1 has been described as a heterophilic ligand for TIM-3 and as playing a role in TIM-3-mediated T cell tolerance and exhaustion (see e.g., WO 2014/022332; Huang, et al. (2014) Nature doi:10.1038/nature13848). In embodiments, co-blockade of CEACAM-1 and TIM-3 has been shown to enhance an anti-tumor immune response in xenograft colorectal cancer models (see e.g., WO 2014/022332; Huang, et al. (2014), supra). In other embodiments, co-blockade of CEACAM-1 and PD-1 reduce T cell tolerance as described, e.g., in WO 2014/059251. Thus, CEACAM inhibitors can be used with the other immunomodulators described herein (e.g., anti-PD-1 and/or anti-TIM-3 inhibitors) to enhance an immune response against a cancer, e.g., a melanoma, a lung cancer (e.g., NSCLC), a bladder cancer, a colon cancer an ovarian cancer, and other cancers as described herein.

[0897] LAG3 (lymphocyte activation gene-3 or CD223) is a cell surface molecule expressed on activated T cells and B cells that has been shown to play a role in CD8+ T cell exhaustion. Antibodies, antibody fragments, and other inhibitors of LAG3 and its ligands are available in the art and may be used combination with a CD19 or BCMA CAR described herein. For example, BMS-986016 (Bristol-Myers Squib) is a monoclonal antibody that targets LAG3. IMP701 (Immutep) is an antagonist LAG3 antibody and IMP731 (Immutep and GlaxoSmithKline) is a depleting LAG3 antibody. Other LAG3 inhibitors include IMP321 (Immutep), which is a recombinant fusion protein of a soluble portion of LAG3 and Ig that binds to MHC class II molecules and activates antigen presenting cells (APC). Other antibodies are disclosed, e.g., in WO2010/019570.

[0898] In some embodiments, the agent which enhances the activity of a CAR-expressing cell can be, e.g., a fusion protein comprising a first domain and a second domain, wherein the first domain is an inhibitory molecule, or fragment thereof, and the second domain is a polypeptide that is associated with a positive signal, e.g., a polypeptide comprising an antracellular signaling domain as described herein. In some embodiments, the polypeptide that is associated with a positive signal can include a costimulatory domain of CD28, CD27, ICOS, e.g., an intracellular signaling domain of CD28, CD27 and/or ICOS, and/or a primary signaling domain, e.g., of CD3 zeta, e.g., described herein. In one embodiment, the fusion protein is expressed by the same cell that expressed the CAR. In another embodiment, the fusion protein is expressed by a cell, e.g., a T cell or NK cell that does not express an anti-BCMA CAR.

[0899] In one embodiment, the agent which enhances activity of a CAR-expressing cell described herein is miR-17-92.

[0900] In one embodiment, the agent which enhances activity of a CAR-described herein is a cytokine. Cytokines have important functions related to T cell expansion, differentiation, survival, and homeostatis. Cytokines that can be administered to the subject receiving a CAR-expressing cell described herein include: IL-2, IL-4, IL-7, IL-9, IL-15, IL-18, and IL-21, or a combination thereof. In preferred embodiments, the cytokine administered is IL-7, IL-15, or IL-21, or a combination thereof. The cytokine can be administered once a day or more than once a day, e.g., twice a day, three times a day, or four times a day. The cytokine can be administered for more than one day, e.g. the cytokine is administered for 2 days, 3 days, 4 days, 5 days, 6 days, 1 week, 2 weeks, 3 weeks, or 4 weeks. For example, the cytokine is administered once a day for 7 days.

[0901] In embodiments, the cytokine is administered in combination with CAR-expressing T cells. The cytokine can be administered simultaneously or concurrently with the CAR-expressing T cells, e.g., administered on the same day. The cytokine may be prepared in the same pharmaceutical composition as the CAR-expressing T cells, or may be prepared in a separate pharmaceutical composition. Alternatively, the cytokine can be administered shortly after administration of the CAR-expressing T cells, e.g., 1 day, 2 days, 3 days, 4 days, 5 days, 6 days, or 7 days after administration of the CAR-expressing T cells. In embodiments where the cytokine is administered in a dosing regimen that occurs over more than one day, the first day of the cytokine dosing regimen can be on the same day as administration with the CAR-expressing T cells, or the first day of the cytokine dosing regimen can be 1 day, 2 days, 3 days, 4 days, 5 days, 6 days, or 7 days after administration of the CAR-expressing T cells. In one embodiment, on the first day, the CAR-expressing T cells are administered to the subject, and on the second day, a cytokine is administered once a day for the next 7 days. In a preferred embodiment, the cytokine to be administered in combination with CAR-expressing T cells is IL-7, IL-15, or IL-21.

[0902] In other embodiments, the cytokine is administered a period of time after administration of CAR-expressing cells, e.g., at least 2 weeks, 3 weeks, 4 weeks, 6 weeks, 8 weeks, 10 weeks, 12 weeks, 4 months, 5 months, 6 months, 7 months, 8 months, 9 months, 10 months, 11 months, or 1 year or more after administration of CAR-expressing cells. In one embodiment, the cytokine is administered after assessment of the subject's response to the CAR-expressing cells. For example, the subject is administered CAR-expressing cells according to the dosage and regimens described herein. The response of the subject to CAR-expressing cell therapy is assessed at 2 weeks, 3 weeks, 4 weeks, 6 weeks, 8 weeks, 10 weeks, 12 weeks, 4 months, 5 months, 6 months, 7 months, 8 months, 9 months, 10 months, 11 months, or 1 year or more after administration of CAR-expressing cells, using any of the methods described herein, including inhibition of tumor growth, reduction of circulating tumor cells, or tumor regression. Subjects that do not exhibit a sufficient response to CAR-expressing cell therapy can be administered a cytokine. Administration of the cytokine to the subject that has sub-optimal response to the CAR-expressing cell therapy improves CAR-expressing cell efficacy or anti-cancer activity. In a preferred embodiment, the cytokine administered after administration of CAR-expressing cells is IL-7.

[0903] Combination with a Low, Immune Enhancing, Dose of an mTOR Inhibitor

[0904] Methods described herein use low, immune enhancing, doses of mTOR inhibitors, e.g., allosteric mTOR inhibitors, including rapalogs such as RAD001. Administration of a low, immune enhancing, dose of an mTOR inhibitor (e.g., a dose that is insufficient to completely suppress the immune system, but sufficient to improve immune function) can optimize the performance of immune effector cells, e.g., T cells or CAR-expressing cells, in the subject. Methods for measuring mTOR inhibition, dosages, treatment regimens, and suitable pharmaceutical compositions are described in U.S. Patent Application No. 2015/01240036, hereby incorporated by reference.

[0905] In an embodiment, administration of a low, immune enhancing, dose of an mTOR inhibitor results in one or more of the following:
[0906] i) a decrease in the number of PD-1 positive immune effector cells;
[0907] ii) an increase in the number of PD-1 negative immune effector cells;
[0908] iii) an increase in the ratio of PD-1 negative immune effector cells/PD-1 positive immune effector cells;
[0909] iv) an increase in the number of naive T cells;
[0910] v) an increase in the expression of one or more of the following markers: CD62L^{high}, CD127^{high}, CD27⁺, and BCL2, e.g., on memory T cells, e.g., memory T cell precursors;
[0911] vi) a decrease in the expression of KLRG1, e.g., on memory T cells, e.g., memory T cell precursors; or
[0912] vii) an increase in the number of memory T cell precursors, e.g., cells with any one or combination of the following characteristics: increased CD62L^{high} increased CD127^{high}, increased CD27⁺, decreased KLRG1, and increased BCL2;

[0913] and wherein any of the foregoing, e.g., i), ii), iii), iv), v), vi), or vii), occurs e.g., at least transiently, e.g., as compared to a non-treated subject.

[0914] In another embodiment, administration of a low, immune enhancing, dose of an mTOR inhibitor results in increased or prolonged proliferation or persistence of CAR-expressing cells, e.g., in culture or in a subject, e.g., as compared to non-treated CAR-expressing cells or a non-treated subject. In embodiments, increased proliferation or persistence is associated with in an increase in the number of CAR-expressing cells. In another embodiment, administration of a low, immune enhancing, dose of an mTOR inhibitor results in increased killing of cancer cells by CAR-expressing cells, e.g., in culture or in a subject, e.g., as compared to non-treated CAR-expressing cells or a non-treated subject. In embodiments, increased killing of cancer cells is associated with in a decrease in tumor volume. In one embodiment, the cells expressing a CAR molecule, e.g., a CAR molecule described herein, are administered in combination with a low, immune enhancing dose of an mTOR inhibitor, e.g., an allosteric mTOR inhibitor, e.g., RAD001, or a catalytic mTOR inhibitor. For example, administration of the low, immune enhancing, dose of the mTOR inhibitor can be initiated prior to administration of a CAR-expressing cell described herein; completed prior to administration of a CAR-expressing cell described herein; initiated at the same time as administration of a CAR-expressing cell described herein; overlapping with administration of a CAR-expressing cell described herein; or continuing after administration of a CAR-expressing cell described herein.

[0915] Alternatively or in addition, administration of a low, immune enhancing, dose of an mTOR inhibitor can optimize immune effector cells to be engineered to express a CAR molecule described herein. In such embodiments, administration of a low, immune enhancing, dose of an mTOR inhibitor, e.g., an allosteric inhibitor, e.g., RAD001, or a catalytic inhibitor, is initiated or completed prior to harvest of immune effector cells, e.g., T cells or NK cells, to be engineered to express a CAR molecule described herein, from a subject.

[0916] In another embodiment, immune effector cells, e.g., T cells or NK cells, to be engineered to express a CAR molecule described herein, e.g., after harvest from a subject, or CAR-expressing immune effector cells, e.g., T cells or NK cells, e.g., prior to administration to a subject, can be cultured in the presence of a low, immune enhancing, dose of an mTOR inhibitor.

[0917] In an embodiment, administering to the subject a low, immune enhancing, dose of an mTOR inhibitor comprises administering, e.g., once per week, e.g., in an immediate release dosage form, 0.1 to 20, 0.5 to 10, 2.5 to 7.5, 3 to 6, or about 5, mgs of RAD001, or a bioequivalent dose thereof. In an embodiment, administering to the subject a low, immune enhancing, dose of an mTOR inhibitor comprises administering, e.g., once per week, e.g., in a sustained release dosage form, 0.3 to 60, 1.5 to 30, 7.5 to 22.5, 9 to 18, or about 15 mgs of RAD001, or a bioequivalent dose thereof.

[0918] In an embodiment, a dose of an mTOR inhibitor is associated with, or provides, mTOR inhibition of at least 5 but no more than 90%, at least 10 but no more than 90%, at least 15, but no more than 90%, at least 20 but no more than 90%, at least 30 but no more than 90%, at least 40 but no more than 90%, at least 50 but no more than 90%, at least 60 but no more than 90%, at least 70 but no more than 90%, at least 5 but no more than 80%, at least 10 but no more than 80%, at least 15, but no more than 80%, at least 20 but no more than 80%, at least 30 but no more than 80%, at least 40 but no more than 80%, at least 50 but no more than 80%, at least 60 but no more than 80%, at least 5 but no more than 70%, at least 10 but no more than 70%, at least 15, but no more than 70%, at least 20 but no more than 70%, at least 30 but no more than 70%, at least 40 but no more than 70%, at least 50 but no more than 70%, at least 5 but no more than 60%, at least 10 but no more than 60%, at least 15, but no more than 60%, at least 20 but no more than 60%, at least 30 but no more than 60%, at least 40 but no more than 60%, at least 5 but no more than 50%, at least 10 but no more than 50%, at least 15, but no more than 50%, at least 20 but no more than 50%, at least 30 but no more than 50%, at least 40 but no more than 50%, at least 5 but no more than 40%, at least 10 but no more than 40%, at least 15, but no more than 40%, at least 20 but no more than 40%, at least 30 but no more than 40%, at least 35 but no more than 40%, at least 5 but no more than 30%, at least 10 but no more than 30%, at least 15, but no more than 30%, at least 20 but no more than 30%, or at least 25 but no more than 30%.

[0919] In an embodiment, administering to the subject a low, immune enhancing, dose of an mTOR inhibitor comprises administering, e.g., once per week, e.g., in an immediate release dosage form, 0.1 to 20, 0.5 to 10, 2.5 to 7.5, 3 to 6, or about 5, mgs of RAD001, or a bioequivalent dose thereof. In an embodiment, administering to the subject a low, immune enhancing, dose of an mTOR inhibitor comprises administering, e.g., once per week, e.g., in a sustained release dosage form, 0.3 to 60, 1.5 to 30, 7.5 to 22.5, 9 to 18, or about 15 mgs of RAD001, or a bioequivalent dose thereof.

[0920] The extent of mTOR inhibition can be conveyed as, or corresponds to, the extent of P70 S6 kinase inhibition, e.g., the extent of mTOR inhibition can be determined by the level of decrease in P70 S6 kinase activity, e.g., by the decrease in phosphorylation of a P70 S6 kinase substrate. The level of mTOR inhibition can be evaluated by various methods, such as measuring P70 S6 kinase activity by the Boulay assay, as described in U.S. Patent Application No. 2015/01240036, hereby incorporated by reference, or as described in U.S. Pat. No. 7,727,950, hereby incorporated by reference; measuring the level of phosphorylated S6 by western blot; or evaluating a change in the ratio of PD1 negative immune effector cells to PD1 positive immune effector cells.

[0921] As used herein, the term “mTOR inhibitor” refers to a compound or ligand, or a pharmaceutically acceptable salt thereof, which inhibits the mTOR kinase in a cell. In an embodiment, an mTOR inhibitor is an allosteric inhibitor. Allosteric mTOR inhibitors include the neutral tricyclic compound rapamycin (sirolimus), rapamycin-related compounds, that is compounds having structural and functional similarity to rapamycin including, e.g., rapamycin derivatives, rapamycin analogs (also referred to as rapalogs) and other macrolide compounds that inhibit mTOR activity. In an embodiment, an mTOR inhibitor is a catalytic inhibitor.

[0922] Rapamycin is a known macrolide antibiotic produced by Streptomyces hygroscopicus having the structure shown in Formula A.

[chemical structure]

[0923] See, e.g., McAlpine, J. B., et al., J. Antibiotics (1991) 44: 688; Schreiber, S. L., et al., J. Am. Chem. Soc. (1991) 113: 7433; U.S. Pat. No. 3,929,992. There are various numbering schemes proposed for rapamycin. To avoid confusion, when specific rapamycin analogs are named herein, the names are given with reference to rapamycin using the numbering scheme of formula A.

[0924] Rapamycin analogs useful in the invention are, for example, 0-substituted analogs in which the hydroxyl group on the cyclohexyl ring of rapamycin is replaced by OR₁ in which R₁ is hydroxyalkyl, hydroxyalkoxyalkyl, acylaminoalkyl, or aminoalkyl; e.g. RAD001, also known as everolimus, as described in U.S. Pat. No. 5,665,772 and WO94/09010, the contents of each are incorporated by reference.

[0925] Other suitable rapamycin analogs include those substituted at the 26- or 28-position. The rapamycin analog may be an epimer of an analog mentioned above, particularly an epimer of an analog substituted in position 40, 28 or 26, and may optionally be further hydrogenated, e.g. as described in U.S. Pat. No. 6,015,815, WO95/14023 and WO99/15530 the contents of which are incorporated by reference, e.g. ABT578 also known as zotarolimus or a rapamycin analog described in U.S. Pat. No. 7,091,213, WO98/02441 and WO01/14387 the contents of which are incorporated by reference, e.g. AP23573 also known as ridaforolimus.

[0926] Examples of rapamycin analogs suitable for use in the present invention from U.S. Pat. No. 5,665,772 include, but are not limited to, 40-O-benzyl-rapamycin, 40-O-(4′-hydroxymethyl)benzyl-rapamycin, 40-O-[4′-(1,2-dihydroxyethyl)]benzyl-rapamycin, 40-O-allyl-rapamycin, 40-O-[3′-(2,2-dimethyl-1,3-dioxolan-4(S)-yl)-prop-2′-en-1′-yl]-rapamycin, (2′E,4′S)-40-O-(4′,5′-dihydroxypent-2′-en-1′-yl)-rapamycin, 40-O-(2-hydroxy)ethoxycarbonylmethyl-rapamycin, 40-O-(2-hydroxy)ethyl-rapamycin, 40-O-(3-hydroxy)propyl-rapamycin, 40-O-(6-hydroxy)hexyl-rapamycin, 40-O-[2-(2-hydroxy)ethoxy]ethyl-rapamycin, 40-O-[(3S)-2,2-dimethyldioxolan-3-yl]methyl-rapamycin, 40-O-[(2S)-2,3-dihydroxyprop-1-yl]-rapamycin, 40-O-(2-acetoxy)ethyl-rapamycin, 40-O-(2-nicotinoyloxy)ethyl-rapamycin, 40-O-[2-(N-morpholino)acetoxy]ethyl-rapamycin, 40-O-(2-N-imidazolylacetoxy)ethyl-rapamycin, 40-O-[2-(N-methyl-N′-piperazinyl)acetoxy]ethyl-rapamycin, 39-O-desmethyl-39,40-O,O-ethylene-rapamycin, (26R)-26-dihydro-40-O-(2-hydroxy)ethyl-rapamycin, 40-O-(2-aminoethyl)-rapamycin, 40-O-(2-acetaminoethyl)-rapamycin, 40-O-(2-nicotinamidoethyl)-rapamycin, 40-O-(2-(N-methyl-imidazo-2′-ylcarbethoxamido)ethyl)-rapamycin, 40-O-(2-ethoxycarbonylaminoethyl)-rapamycin, 40-O-(2-tolylsulfonamidoethyl)-rapamycin and 40-O-[2-(4′,5′-dicarboethoxy-1′,2′,3′-triazol-1′-yl)-ethyl]-rapamycin.

[0927] Other rapamycin analogs useful in the present invention are analogs where the hydroxyl group on the cyclohexyl ring of rapamycin and/or the hydroxy group at the 28 position is replaced with an hydroxyester group are known, for example, rapamycin analogs found in U.S. RE44,768, e.g. temsirolimus.

[0928] Other rapamycin analogs useful in the preset invention include those wherein the methoxy group at the 16 position is replaced with another substituent, preferably (optionally hydroxy-substituted) alkynyloxy, benzyl, orthomethoxybenzyl or chlorobenzyl and/or wherein the mexthoxy group at the 39 position is deleted together with the 39 carbon so that the cyclohexyl ring of rapamycin becomes a cyclopentyl ring lacking the 39 position methyoxy group; e.g. as described in WO95/16691 and WO96/41807, the contents of which are incorporated by reference. The analogs can be further modified such that the hydroxy at the 40-position of rapamycin is alkylated and/or the 32-carbonyl is reduced.

[0929] Rapamycin analogs from WO95/16691 include, but are not limited to, 16-demthoxy-16-(pent-2-ynyl)oxy-rapamycin, 16-demthoxy-16-(but-2-ynyl)oxy-rapamycin, 16-demthoxy-16-(propargyl)oxy-rapamycin, 16-demethoxy-16-(4-hydroxy-but-2-ynyl)oxy-rapamycin, 16-demthoxy-16-benzyloxy-40-O-(2-hydroxyethyl)-rapamycin, 16-demthoxy-16-benzyloxy-rapamycin, 16-demethoxy-16-ortho-methoxybenzyl-rapamycin, 16-demethoxy-40-O-(2-methoxyethyl)-16-pent-2-ynyl)oxy-rapamycin, 39-demethoxy-40-desoxy-39-formyl-42-nor-rapamycin, 39-demethoxy-40-desoxy-39-hydroxymethyl-42-nor-rapamycin, 39-demethoxy-40-desoxy-39-carboxy-42-nor-rapamycin, 39-demethoxy-40-desoxy-39-(4-methyl-piperazin-1-yl)carbonyl-42-nor-rapamycin, 39-demethoxy-40-desoxy-39-(morpholin-4-yl)carbonyl-42-nor-rapamycin, 39-demethoxy-40-desoxy-39-[N-methyl, N-(2-pyridin-2-yl-ethyl)]carbamoyl-42-nor-rapamycin and 39-demethoxy-40-desoxy-39-(p-toluenesulfonylhydrazonomethyl)-42-nor-rapamycin.

[0930] Rapamycin analogs from WO96/41807 include, but are not limited to, 32-deoxo-rapamycin, 16-O-pent-2-ynyl-32-deoxo-rapamycin, 16-O-pent-2-ynyl-32-deoxo-40-O-(2-hydroxy-ethyl)-rapamycin, 16-O-pent-2-ynyl-32-(S)-dihydro-40-O-(2-hydroxyethyl)-rapamycin, 32(S)-dihydro-40-O-(2-methoxy)ethyl-rapamycin and 32(S)-dihydro-40-O-(2-hydroxyethyl)-rapamycin.

[0931] Another suitable rapamycin analog is umirolimus as described in US2005/0101624 the contents of which are incorporated by reference.

[0932] RAD001, otherwise known as everolimus (Afinitor®), has the chemical name (1R,9S,12S,15R,16E,18R,19R,21R,23S,24E,26E,28E,30S,32S,35R)-1,18-dihydroxy-12-{(1R)-2-[(1S,3R,4R)-4-(2-hydroxyethoxy)-3-methoxycyclohexyl]-1-methylethyl}-19,30-dimethoxy-15,17,21,23,29,35-hexamethyl-11,36-dioxa-4-aza-tricyclo[30.3.1.04,9]hexatriaconta-16,24,26,28-tetraene-2,3,10,14,20-pentaone, as described in U.S. Pat. No. 5,665,772 and WO94/09010, the contents of each are incorporated by reference.

[0933] Further examples of allosteric mTOR inhibitors include sirolimus (rapamycin, AY-22989), 40-[3-hydroxy-2-(hydroxymethyl)-2-methylpropanoate]-rapamycin (also called temsirolimus or CCI-779) and ridaforolimus (AP-23573/MK-8669). Other examples of allosteric mTor inhibitors include zotarolimus (ABT578) and umirolimus.

[0934] Alternatively or additionally, catalytic, ATP-competitive mTOR inhibitors have been found to target the mTOR kinase domain directly and target both mTORC1 and mTORC2. These are also more effective inhibitors of mTORC1 than such allosteric mTOR inhibitors as rapamycin, because they modulate rapamycin-resistant mTORC1 outputs such as 4EBP1-T37/46 phosphorylation and cap-dependent translation.

[0935] Catalytic inhibitors include: BEZ235 or 2-methyl-2-[4-(3-methyl-2-oxo-8-quinolin-3-yl-2,3-dihydro-imidazo[4,5-c]quinolin-1-yl)-phenyl]-propionitrile, or the monotosylate salt form (the synthesis of BEZ235 is described in WO2006/122806); CCG168 (otherwise known as AZD-8055, Chresta, C. M., et al., Cancer Res, 2010, 70(1), 288-298) which has the chemical name {5-[2,4-bis-((S)-3-methyl-morpholin-4-yl)-pyrido[2,3d]pyrimidin-7-yl]-2-methoxy-phenyl}-methanol; 3-[2,4-bis[(3S)-3-methylmorpholin-4-yl]-pyrido[2,3-d]pyrimidin-7-yl]-N-methylbenzamide (WO09104019); 3-(2-aminobenzo[d]oxazol-5-yl)-1-isopropyl-1H-pyrazolo[3,4-d]pyrimidin-4-amine (WO10051043 and WO2013023184); A N-(3-(N-(3-((3,5-dimethoxyphenyl)amino)quinoxaline-2-yl)sulfamoyl)phenyl)-3-methoxy-4-methylbenzamide (WO07044729 and WO12006552); PKI-587 (Venkatesan, A. M., J. Med. Chem., 2010, 53, 2636-2645) which has the chemical name 1-[4-[4-(dimethylamino)piperidine-1-carbonyl]phenyl]-3-[4-(4,6-dimorpholino-1,3,5-triazin-2-yl)phenyl]urea; GSK-2126458 (ACS Med. Chem. Lett., 2010, 1, 39-43) which has the chemical name 2,4-difluoro-N-{2-methoxy-5-[4-(4-pyridazinyl)-6-quinolinyl]-3-pyridinyl}benzenesulfonamide; 5-(9-isopropyl-8-methyl-2-morpholino-9H-purin-6-yl)pyrimidin-2-amine (WO10114484); and (E)-N-(8-(6-amino-5-(trifluoromethyl)pyridin-3-yl)-1-(6-(2-cyanopropan-2-yl)pyridin-3-yl)-3-methyl-1H-imidazo[4,5-c]quinolin-2(3H)-ylidene)cyanamide (WO12007926).

[0936] Further examples of catalytic mTOR inhibitors include 8-(6-methoxy-pyridin-3-yl)-3-methyl-1-(4-piperazin-1-yl-3-trifluoromethyl-phenyl)-1,3-dihydro-imidazo[4,5-c]quinolin-2-one (WO2006/122806) and Ku-0063794 (Garcia-Martinez J M, et al., Biochem J., 2009, 421(1), 29-42. Ku-0063794 is a specific inhibitor of the mammalian target of rapamycin (mTOR).) WYE-354 is another example of a catalytic mTOR inhibitor (Yu K, et al. (2009). Biochemical, Cellular, and In vivo Activity of Novel ATP-Competitive and Selective Inhibitors of the Mammalian Target of Rapamycin. Cancer Res. 69(15): 6232-6240).

[0937] mTOR inhibitors useful according to the present invention also include prodrugs, derivatives, pharmaceutically acceptable salts, or analogs thereof of any of the foregoing.

[0938] mTOR inhibitors, such as RAD001, may be formulated for delivery based on well-established methods in the art based on the particular dosages described herein. In particular, U.S. Pat. No. 6,004,973 (incorporated herein by reference) provides examples of formulations useable with the mTOR inhibitors described herein.

### Methods and Biomarkers for Evaluating CAR-Effectiveness or Sample Suitability

[0939] In another aspect, the invention features a method of evaluating or monitoring the effectiveness of a CAR-expressing cell therapy (e.g., a BCMA CAR therapy), in a subject (e.g., a subject having a cancer, e.g., a hematological cancer), or the suitability of a sample (e.g., an apheresis sample) for a CAR therapy (e.g., a BCMA CAR therapy). The method includes acquiring a value of effectiveness to the CAR therapy, or sample suitability, wherein said value is indicative of the effectiveness or suitability of the CAR-expressing cell therapy.

[0940] In embodiments, the value of effectiveness to the CAR therapy, or sample suitability, comprises a measure of one, two, three, four, five, six or more (all) of the following:

[0941] (i) the level or activity of one, two, three, or more (e.g., all) of resting T_{EFF} cells, resting T_{REG} cells, younger T cells (e.g., younger CD4 or CD8 cells, or gamma/delta T cells), or early memory T cells, or a combination thereof, in a sample (e.g., an apheresis sample or a manufactured CAR-expressing cell product sample);

[0942] (ii) the level or activity of one, two, three, or more (e.g., all) of activated T_{EFF} cells, activated T_{REG} cells, older T cells (e.g., older CD4 or CD8 cells), or late memory T cells, or a combination thereof, in a sample (e.g., an apheresis sample or a manufactured CAR-expressing cell product sample);

[0943] (iii) the level or activity of an immune cell exhaustion marker, e.g., one, two or more immune checkpoint inhibitors (e.g., PD-1, PD-L1, TIM-3 and/or LAG-3) in a sample (e.g., an apheresis sample or a manufactured CAR-expressing cell product sample). In one embodiment, an immune cell has an exhausted phenotype, e.g., co-expresses at least two exhaustion markers, e.g., co-expresses PD-1 and TIM-3. In other embodiments, an immune cell has an exhausted phenotype, e.g., co-expresses at least two exhaustion markers, e.g., co-expresses PD-1 and LAG-3;

[0944] (iv) the level or activity of CD27 and/or CD45RO− (e.g., CD27+CD45RO−) immune effector cells, e.g., in a CD4+ or a CD8+ T cell population, in a sample (e.g., an apheresis sample or a manufactured CAR-expressing cell product sample);

[0945] (v) the level or activity of one, two, three, four, five, ten, twenty or more of the biomarkers chosen from CCL20, IL-17a and/or IL-6, PD-1, PD-L1, LAG-3, TIM-3, CD57, CD27, CD122, CD62L, KLRG1;

[0946] (vi) a cytokine level or activity (e.g., quality of cytokine reportoire) in a CAR-expressing cell product sample, e.g., BCMA-expressing cell product sample; or

[0947] (vii) a transduction efficiency of a CAR-expressing cell in a manufactured CAR-expressing cell product sample.

[0948] In some embodiments of any of the methods disclosed herein, the CAR-expressing cell therapy comprises a plurality (e.g., a population) of CAR-expressing immune effector cells, e.g., a plurality (e.g., a population) of T cells or NK cells, or a combination thereof. In one embodiment, the CAR-expressing cell therapy is a BCMACAR therapy.

[0949] In some embodiments of any of the methods disclosed herein, the measure of one or more of (i)-(vii) is obtained from an apheresis sample acquired from the subject. The apheresis sample can be evaluated prior to infusion or re-infusion.

[0950] In some embodiments of any of the methods disclosed herein, the measure of one or more of (i)-(vii) is obtained from a manufactured CAR-expressing cell product sample, e.g., BCMACAR-expressing cell product sample. The manufactured CAR-expressing cell product can be evaluated prior to infusion or re-infusion.

[0951] In some embodiments of any of the methods disclosed herein, the subject is evaluated prior to receiving, during, or after receiving, the CAR-expressing cell therapy.

[0952] In some embodiments of any of the methods disclosed herein, the measure of one or more of (i)-(vii) evaluates a profile for one or more of gene expression, flow cytometry or protein expression.

[0953] In some embodiments of any of the methods disclosed herein, the method further comprises identifying the subject as a responder, a non-responder, a relapser or a non-relapser, based on a measure of one or more of (i)-(vii).

[0954] In some embodiments of any of the methods disclosed herein, a responder (e.g., a complete responder) has, or is identified as having, a greater level or activity of one, two, or more (all) of GZMK, PPF1BP2, or naïve T cells as compared to a non-responder.

[0955] In some embodiments of any of the methods disclosed herein, a non-responder has, or is identified as having, a greater level or activity of one, two, three, four, five, six, seven, or more (e.g., all) of IL22, IL-2RA, IL-21, IRF8, IL8, CCL17, CCL22, effector T cells, or regulatory T cells, as compared to a responder.

[0956] In an embodiment, a relapser is a patient having, or who is identified as having, an increased level of expression of one or more of (e.g., 2, 3, 4, or all of) the following genes, compared to non relapsers: MIR199A1, MIR1203, uc021ovp, ITM2C, and HLA-DQB1 and/or a decreased levels of expression of one or more of (e.g., 2, 3, 4, 5, 6, 7, 8, 9, 10, 11, or all of) the following genes, compared to non relapsers: PPIAL4D, TTTY10, TXLNG2P, MIR4650-1, KDM5D, USP9Y, PRKY, RPS4Y2, RPS4Y1, NCRNA00185, SULT1E1, and EIF1AY.

[0957] In some embodiments of any of the methods disclosed herein, a complete responder has, or is identified as having, a greater, e.g., a statistically significant greater, percentage of CD8+ T cells compared to a reference value, e.g., a non-responder percentage of CD8+ T cells.

[0958] In some embodiments of any of the methods disclosed herein, a complete responder has, or is identified as having, a greater percentage of CD27+CD45RO− immune effector cells, e.g., in the CD8+ population, compared to a reference value, e.g., a non-responder number of CD27+CD45RO− immune effector cells.

[0959] In some embodiments of any of the methods disclosed herein, a complete responder or a partial responder has, or is identified as having, a greater, e.g., a statistically significant greater, percentage of CD4+ T cells compared to a reference value, e.g., a non-responder percentage of CD4+ T cells.

[0960] In some embodiments of any of the methods disclosed herein, a complete responder has, or is identified as having, a greater percentage of one, two, three, or more (e.g., all) of resting T_{EFF} cells, resting T_{REG} cells, younger T cells (e.g., younger CD4 or CD8 cells, or gamma/delta T cells), or early memory T cells, or a combination thereof, compared to a reference value, e.g., a non-responder number of resting T_{EFF} cells, resting T_{REG} cells, younger T cells (e.g., younger CD4 or CD8 cells), or early memory T cells.

[0961] In some embodiments of any of the methods disclosed herein, a non-responder has, or is identified as having, a greater percentage of one, two, three, or more (e.g., all) of activated T_{EFF} cells, activated T_{REG} cells, older T cells (e.g., older CD4 or CD8 cells), or late memory T cells, or a combination thereof, compared to a reference value, e.g., a responder number of activated T_{EFF} cells, activated T_{REG} cells, older T cells (e.g., older CD4 or CD8 cells), or late memory T cells.

[0962] In some embodiments of any of the methods disclosed herein, a non-responder has, or is identified as having, a greater percentage of an immune cell exhaustion marker, e.g., one, two or more immune checkpoint inhibitors (e.g., PD-1, PD-L1, TIM-3 and/or LAG-3). In one embodiment, a non-responder has, or is identified as having, a greater percentage of PD-1, PD-L1, or LAG-3 expressing immune effector cells (e.g., CD4+ T cells and/or CD8+ T cells) (e.g., CAR-expressing CD4+ cells and/or CD8+ T cells) compared to the percentage of PD-1 or LAG-3 expressing immune effector cells from a responder.

[0963] In one embodiment, a non-responder has, or is identified as having, a greater percentage of immune cells having an exhausted phenotype, e g, immune cells that co-express at least two exhaustion markers, e.g., co-expresses PD-1, PD-L1 and/or TIM-3. In other embodiments, a non-responder has, or is identified as having, a greater percentage of immune cells having an exhausted phenotype, e.g., immune cells that co-express at least two exhaustion markers, e.g., co-expresses PD-1 and LAG-3.

[0964] In some embodiments of any of the methods disclosed herein, a non-responder has, or is identified as having, a greater percentage of PD-1/PD-L1+/LAG-3+ cells in the CAR-expressing cell population (e.g., a BCMACAR+ cell population) compared to a responder (e.g., a complete responder) to the CAR-expressing cell therapy.

[0965] In some embodiments of any of the methods disclosed herein, a partial responder has, or is identified as having, a higher percentages of PD-1/PD-L1+/LAG-3+ cells, than a responder, in the CAR-expressing cell population (e.g., a BCMACAR+ cell population).

[0966] In some embodiments of any of the methods disclosed herein, a non-responder has, or is identified as having, an exhausted phenotype of PD1/PD-L1+ CAR+ and co-expression of LAG3 in the CAR-expressing cell population (e.g., a BCMACAR+ cell population).

[0967] In some embodiments of any of the methods disclosed herein, a non-responder has, or is identified as having, a greater percentage of PD-1/PD-L1+/TIM-3+ cells in the CAR-expressing cell population (e.g., a BCMACAR+ cell population) compared to the responder (e.g., a complete responder).

[0968] In some embodiments of any of the methods disclosed herein, a partial responders has, or is identified as having, a higher percentage of PD-1/PD-L1+/TIM-3+ cells, than responders, in the CAR-expressing cell population (e.g., a BCMACAR+ cell population).

[0969] In some embodiments of any of the methods disclosed herein, the presence of CD8+CD27+CD45RO− T cells in an apheresis sample is a positive predictor of the subject response to a CAR-expressing cell therapy (e.g., a BCMACAR therapy).

[0970] In some embodiments of any of the methods disclosed herein, a high percentage of PD1+CAR+ and LAG3+ or TIM3+ T cells in an apheresis sample is a poor prognostic predictor of the subject response to a CAR-expressing cell therapy (e.g., a BCMACAR therapy).

[0971] In some embodiments of any of the methods disclosed herein, the responder (e.g., the complete or partial responder) has one, two, three or more (or all) of the following profile:

[0972] (i) has a greater number of CD27+ immune effector cells compared to a reference value, e.g., a non-responder number of CD27+ immune effector cells;

[0973] (ii) (i) has a greater number of CD8+ T cells compared to a reference value, e.g., a non-responder number of CD8+ T cells;

[0974] (iii) has a lower number of immune cells expressing one or more checkpoint inhibitors, e.g., a checkpoint inhibitor chosen from PD-1, PD-L1, LAG-3, TIM-3, or KLRG-1, or a combination, compared to a reference value, e.g., a non-responder number of cells expressing one or more checkpoint inhibitors; or

[0975] (iv) has a greater number of one, two, three, four or more (all) of resting T_{EFF} cells, resting T_{REG} cells, naïve CD4 cells, unstimulated memory cells or early memory T cells, or a combination thereof, compared to a reference value, e.g., a non-responder number of resting T_{EFF} cells, resting T_{REG} cells, naïve CD4 cells, unstimulated memory cells or early memory T cells.

[0976] In some embodiments of any of the methods disclosed herein, the cytokine level or activity of (vi) is chosen from one, two, three, four, five, six, seven, eight, or more (or all) of cytokine CCL20/MIP3α, IL17A, IL6, GM-CSF, IFNγ, IL10, IL13, IL2, IL21, IL4, IL5, IL9 or TNFα, or a combination thereof. The cytokine can be chosen from one, two, three, four or more (all) of IL-17a, CCL20, IL2, IL6, or TNFα. In one embodiment, an increased level or activity of a cytokine is chosen from one or both of IL-17a and CCL20, is indicative of increased responsiveness or decreased relapse. In some embodiments of any of the methods disclosed herein, a transduction efficiency of 15% or higher in (vii) is indicative of increased responsiveness or decreased relapse.

[0977] In some embodiments of any of the methods disclosed herein, a transduction efficiency of less than 15% in (vii) is indicative of decreased responsiveness or increased relapse.

[0978] In embodiments, the responder, a non-responder, a relapser or a non-relapser identified by the methods herein can be further evaluated according to clinical criteria. For example, a complete responder has, or is identified as, a subject having a disease, e.g., a cancer, who exhibits a complete response, e.g., a complete remission, to a treatment. A complete response may be identified, e.g., using the NCCN Guidelines®, or Cheson et al, J Clin Oncol 17:1244 (1999) and Cheson et al., “Revised Response Criteria for Malignant Lymphoma”, J Clin Oncol 25:579-586 (2007) (both of which are incorporated by reference herein in their entireties), as described herein. A partial responder has, or is identified as, a subject having a disease, e.g., a cancer, who exhibits a partial response, e.g., a partial remission, to a treatment. A partial response may be identified, e.g., using the NCCN Guidelines®, or Cheson criteria as described herein. A non-responder has, or is identified as, a subject having a disease, e.g., a cancer, who does not exhibit a response to a treatment, e.g., the patient has stable disease or progressive disease. A non-responder may be identified, e.g., using the NCCN Guidelines®, or Cheson criteria as described herein.

[0979] Alternatively, or in combination with the methods disclosed herein, responsive to said value, performing one, two, three four or more of:

[0980] administering e.g., to a responder or a non-relapser, a CAR-expressing cell therapy;

[0981] administered an altered dosing of a CAR-expressing cell therapy;

[0982] altering the schedule or time course of a CAR-expressing cell therapy;

[0983] administering, e.g., to a non-responder or a partial responder, an additional agent in combination with a CAR-expressing cell therapy, e.g., a checkpoint inhibitor, e.g., a checkpoint inhibitor described herein;

[0984] administering to a non-responder or partial responder a therapy that increases the number of younger T cells in the subject prior to treatment with a CAR-expressing cell therapy;

[0985] modifying a manufacturing process of a CAR-expressing cell therapy, e.g., enriching for younger T cells prior to introducing a nucleic acid encoding a CAR, or increasing the transduction efficiency, e.g., for a subject identified as a non-responder or a partial responder;

[0986] administering an alternative therapy, e.g., for a non-responder or partial responder or relapser; or

[0987] if the subject is, or is identified as, a non-responder or a relapser, decreasing the T_{REG} cell population and/or T_{REG} gene signature, e.g., by one or more of CD25 depletion, administration of cyclophosphamide, anti-GITR antibody, or a combination thereof.

[0988] In certain embodiments, the subject is pre-treated with an anti-GITR antibody. In certain embodiment, the subject is treated with an anti-GITR antibody prior to infusion or re-infusion.

### Biopolymer Delivery Methods

[0989] In some embodiments, one or more CAR-expressing cells as disclosed herein can be administered or delivered to the subject via a biopolymer scaffold, e.g., a biopolymer implant. Biopolymer scaffolds can support or enhance the delivery, expansion, and/or dispersion of the CAR-expressing cells described herein. A biopolymer scaffold comprises a biocompatible (e.g., does not substantially induce an inflammatory or immune response) and/or a biodegradable polymer that can be naturally occurring or synthetic.

[0990] Examples of suitable biopolymers include, but are not limited to, agar, agarose, alginate, alginate/calcium phosphate cement (CPC), beta-galactosidase (β-GAL), (1,2,3,4,6-pentaacetyl a-D-galactose), cellulose, chitin, chitosan, collagen, elastin, gelatin, hyaluronic acid collagen, hydroxyapatite, poly(3-hydroxybutyrate-co-3-hydroxy-hexanoate) (PHBHHx), poly(lactide), poly(caprolactone) (PCL), poly(lactide-co-glycolide) (PLG), polyethylene oxide (PEO), poly(lactic-co-glycolic acid) (PLGA), polypropylene oxide (PPO), polyvinyl alcohol) (PVA), silk, soy protein, and soy protein isolate, alone or in combination with any other polymer composition, in any concentration and in any ratio. The biopolymer can be augmented or modified with adhesion- or migration-promoting molecules, e.g., collagen-mimetic peptides that bind to the collagen receptor of lymphocytes, and/or stimulatory molecules to enhance the delivery, expansion, or function, e.g., anti-cancer activity, of the cells to be delivered. The biopolymer scaffold can be an injectable, e.g., a gel or a semi-solid, or a solid composition.

[0991] In some embodiments, CAR-expressing cells described herein are seeded onto the biopolymer scaffold prior to delivery to the subject. In embodiments, the biopolymer scaffold further comprises one or more additional therapeutic agents described herein (e.g., another CAR-expressing cell, an antibody, or a small molecule) or agents that enhance the activity of a CAR-expressing cell, e.g., incorporated or conjugated to the biopolymers of the scaffold. In embodiments, the biopolymer scaffold is injected, e.g., intratumorally, or surgically implanted at the tumor or within a proximity of the tumor sufficient to mediate an anti-tumor effect. Additional examples of biopolymer compositions and methods for their delivery are described in Stephan et al., Nature Biotechnology, 2015, 33:97-101; and WO2014/110591.

### Pharmaceutical Compositions and Treatments

[0992] Pharmaceutical compositions of the present invention may comprise a CAR-expressing cell, e.g., a plurality of CAR-expressing cells, as described herein, in combination with one or more pharmaceutically or physiologically acceptable carriers, diluents or excipients. Such compositions may comprise buffers such as neutral buffered saline, phosphate buffered saline and the like; carbohydrates such as glucose, mannose, sucrose or dextrans, mannitol; proteins; polypeptides or amino acids such as glycine; antioxidants; chelating agents such as EDTA or glutathione; adjuvants (e.g., aluminum hydroxide); and preservatives. Compositions of the present invention are in one aspect formulated for intravenous administration.

[0993] Pharmaceutical compositions of the present invention may be administered in a manner appropriate to the disease to be treated (or prevented). The quantity and frequency of administration will be determined by such factors as the condition of the patient, and the type and severity of the patient's disease, although appropriate dosages may be determined by clinical trials.

[0994] In one embodiment, the pharmaceutical composition is substantially free of, e.g., there are no detectable levels of a contaminant, e.g., selected from the group consisting of endotoxin, mycoplasma, replication competent lentivirus (RCL), p24, VSV-G nucleic acid, HIV gag, residual anti-CD3/anti-CD28 coated beads, mouse antibodies, pooled human serum, bovine serum albumin, bovine serum, culture media components, vector packaging cell or plasmid components, a bacterium and a fungus. In one embodiment, the bacterium is at least one selected from the group consisting of Alcaligenes faecalis, Candida albicans, Escherichia coli, Haemophilus influenza, Neisseria meningitides, Pseudomonas aeruginosa, Staphylococcus aureus, Streptococcus pneumonia, and Streptococcus pyogenes group A.

[0995] When “an immunologically effective amount,” “an anti-tumor effective amount,” “a tumor-inhibiting effective amount,” or “therapeutic amount” is indicated, the precise amount of the compositions of the present invention to be administered can be determined by a physician with consideration of individual differences in age, weight, tumor size, extent of infection or metastasis, and condition of the patient (subject). It can generally be stated that a pharmaceutical composition comprising the T cells described herein may be administered at a dosage of 10⁴ to 10⁹ cells/kg body weight, in some instances 10⁵ to 10⁶ cells/kg body weight, including all integer values within those ranges. T cell compositions may also be administered multiple times at these dosages. The cells can be administered by using infusion techniques that are commonly known in immunotherapy (see, e.g., Rosenberg et al., New Eng. J. of Med. 319:1676, 1988).

[0996] In certain aspects, it may be desired to administer activated T cells to a subject and then subsequently redraw blood (or have an apheresis performed), activate T cells therefrom according to the present invention, and reinfuse the patient with these activated and expanded T cells. This process can be carried out multiple times every few weeks. In certain aspects, T cells can be activated from blood draws of from 10cc to 400cc. In certain aspects, T cells are activated from blood draws of 20cc, 30cc, 40cc, 50cc, 60cc, 70cc, 80cc, 90cc, or 100cc.

[0997] The administration of the subject compositions may be carried out in any convenient manner, including by aerosol inhalation, injection, ingestion, transfusion, implantation or transplantation. The compositions described herein may be administered to a patient trans arterially, subcutaneously, intradermally, intratumorally, intranodally, intramedullary, intramuscularly, by intravenous (i.v.)

[0998] injection, or intraperitoneally. In one aspect, the T cell compositions of the present invention are administered to a patient by intradermal or subcutaneous injection. In one aspect, the CAR-expressing cell (e.g., T cell or NK cell) compositions of the present invention are administered by i.v. injection. The compositions of CAR-expressing cells (e.g., T cells or NK cells) may be injected directly into a tumor, lymph node, or site of infection.

[0999] In a particular exemplary aspect, subjects may undergo leukapheresis, wherein leukocytes are collected, enriched, or depleted ex vivo to select and/or isolate the cells of interest, e.g., immune effector cells (e.g., T cells or NK cells). These immune effector cell (e.g., T cell or NK cell) isolates may be expanded by methods known in the art and treated such that one or more CAR constructs of the invention may be introduced, thereby creating a CAR-expressing cell (e.g., CAR T cell or CAR-expressing NK cell) of the invention. Subjects in need thereof may subsequently undergo standard treatment with high dose chemotherapy followed by peripheral blood stem cell transplantation. In certain aspects, following or concurrent with the transplant, subjects receive an infusion of the expanded CAR-expressing cells (e.g., CAR T cells or NK cells) of the present invention. In an additional aspect, expanded cells are administered before or following surgery.

[1000] In embodiments, lymphodepletion is performed on a subject, e.g., prior to administering one or more cells that express a CAR described herein, e.g., a BCMA-binding CAR described herein. In embodiments, the lymphodepletion comprises administering one or more of melphalan, cytoxan, cyclophosphamide, and fludarabine.

[1001] The dosage of the above treatments to be administered to a patient will vary with the precise nature of the condition being treated and the recipient of the treatment. The scaling of dosages for human administration can be performed according to art-accepted practices. The dose for CAMPATH, for example, will generally be in the range 1 to about 100 mg for an adult patient, usually administered daily for a period between 1 and 30 days. The preferred daily dose is 1 to 10 mg per day although in some instances larger doses of up to 40 mg per day may be used (described in U.S. Pat. No. 6,120,766).

[1002] In one embodiment, the CAR is introduced into immune effector cells (e.g., T cells or NK cells), e.g., using in vitro transcription, and the subject (e.g., human) receives an initial administration of CAR immune effector cells (e.g., T cells or NK cells) of the invention, and one or more subsequent administrations of the CAR immune effector cells (e.g., T cells or NK cells) of the invention, wherein the one or more subsequent administrations are administered less than 15 days, e.g., 14, 13, 12, 11, 10, 9, 8, 7, 6, 5, 4, 3, or 2 days after the previous administration. In one embodiment, more than one administration of the CAR immune effector cells (e.g., T cells or NK cells) of the invention are administered to the subject (e.g., human) per week, e.g., 2, 3, or 4 administrations of the CAR immune effector cells (e.g., T cells or NK cells) of the invention are administered per week. In one embodiment, the subject (e.g., human subject) receives more than one administration of the CAR immune effector cells (e.g., T cells or NK cells) per week (e.g., 2, 3 or 4 administrations per week) (also referred to herein as a cycle), followed by a week of no CAR immune effector cells (e.g., T cells or NK cells) administrations, and then one or more additional administration of the CAR immune effector cells (e.g., T cells or NK cells) (e.g., more than one administration of the CAR immune effector cells (e.g., T cells or NK cells) per week) is administered to the subject. In another embodiment, the subject (e.g., human subject) receives more than one cycle of CAR immune effector cells (e.g., T cells or NK cells), and the time between each cycle is less than 10, 9, 8, 7, 6, 5, 4, or 3 days. In one embodiment, the CAR immune effector cells (e.g., T cells or NK cells) are administered every other day for 3 administrations per week. In one embodiment, the CAR immune effector cells (e.g., T cells or NK cells) of the invention are administered for at least two, three, four, five, six, seven, eight or more weeks.

[1003] In one aspect, BCMA CAR-expressing cells (e.g., BCMA CARTs or BCMA CAR-expressing NK cells) are generated using lentiviral viral vectors, such as lentivirus. CAR-expressing cells (e.g., CARTs or CAR-expressing NK cells) generated that way will have stable CAR expression.

[1004] In one aspect, CAR-expressing cells, e.g., CARTs, are generated using a viral vector such as a gammaretroviral vector, e.g., a gammaretroviral vector described herein. CARTs generated using these vectors can have stable CAR expression.

[1005] In one aspect, CAR-expressing cells (e.g., CARTs or CAR-expressing NK cells) transiently express CAR vectors for 4, 5, 6, 7, 8, 9, 10, 11, 12, 13, 14, 15 days after transduction. Transient expression of CARs can be effected by RNA CAR vector delivery. In one aspect, the CAR RNA is transduced into the cell, e.g., T cell or NK cell, by electroporation.

[1006] A potential issue that can arise in patients being treated using transiently expressing CAR-expressing cells (e.g., CARTs or CAR-expressing NK cells) (particularly with murine scFv bearing CAR-expressing cells (e.g., CARTs or CAR-expressing NK cells)) is anaphylaxis after multiple treatments.

[1007] Without being bound by this theory, it is believed that such an anaphylactic response might be caused by a patient developing humoral anti-CAR response, i.e., anti-CAR antibodies having an anti-IgE isotype. It is thought that a patient's antibody producing cells undergo a class switch from IgG isotype (that does not cause anaphylaxis) to IgE isotype when there is a ten to fourteen day break in exposure to antigen.

[1008] If a patient is at high risk of generating an anti-CAR antibody response during the course of transient CAR therapy (such as those generated by RNA transductions), CAR-expressing cell (e.g., CART or CAR-expressing NK cell) infusion breaks should not last more than ten to fourteen days.

### EXAMPLES

[1009] The invention is further described in detail by reference to the following experimental examples. These examples are provided for purposes of illustration only, and are not intended to be limiting unless otherwise specified. Thus, the invention should in no way be construed as being limited to the following examples, but rather, should be construed to encompass any and all variations which become evident as a result of the teaching provided herein.

[1010] Without further description, it is believed that one of ordinary skill in the art can, using the preceding description and the following illustrative examples, make and utilize the molecules of the present invention and practice the claimed methods. The following working examples specifically point out various aspects of the present invention, and are not to be construed as limiting in any way the remainder of the disclosure.

### Example 1

### Summary

[1011] In this example, the effect of gamma secretase inhibitors (GSIs) on BCMA cell surface expression and BCMA shedding in vitro was examined Treatment of BCMA-expressing cells with a GSI prevented shedding of BCMA into cell culture supernatants, which in turn increased cell surface expression of BCMA in vitro.

### Materials and Methods

[1012] Human cancer cell lines expressing various levels of human BCMA (NCI-H929^{[High]} MM1S^{[Med]}, and U266B1^{[low]}) were all transduced to constitutively express luciferase, which is used to measure cell viability/survival with the BrightGlo reagent (Promega # E2650).

[1013] BCMA expressing cell lines were treated overnight with and without GSIs. Cell culture supernatants were collected and quantified for levels of soluble BCMA by ELISA (R&D Systems, # DY193). Additionally, remaining cells were pelleted, stained with a PE conjugated BCMA antibody (clone 19F2, Biolegend #357504) and analyzed by flow cytometry for BCMA cell surface expression levels.

### Results

[1014] The level of soluble (shed) BCMA in cell culture supernatants was measured by ELISA following 24-hour treatment with or without 0.5 μM DAPT. GSI treatment decreased levels of soluble BCMA in cultures to levels below the assay detection limit (Table 28).

TABLE 28
Gamma secretase inhibitor DAPT inhibits
shedding of BCMA in vitro

| ng/mL BMCA | NCI-H929 | MM1S | RPM-8226 |
|---|---|---|---|
| Untreated | 137.5 | 40.8 | 49.8 |
| 0.5 μM DAPT | <0.03 | <0.03 | <0.03 |

[1015] BCMA cell surface expression level was determined by flow cytometry on cell lines with or without GSI treatment. As shown in FIG. 1, GSI treatment resulted in a 3-15 fold increase in cell surface expression of BCMA compared to non-treated cells (3 fold in NCI-H929, 10 fold in MM1S, and 15 fold in U266B1).

### DISCUSSION

[1016] Table 28 shows the efficiency of DAPT at preventing the shedding of BCMA from the cell surface into the culture supernatant. This would be expected to enhance BCMA-directed therapies by removing a potential drug sink: binding of the therapies to soluble BCMA may neutralize their ability to bind and target cancer cells. FIG. 1 demonstrates that treatment of BCMA-expressing multiple myeloma cell lines with two different GSIs, DAPT and LY-411,575, strongly enhances cell surface expression of BCMA. Increased cell surface expression of BCMA provides more potential binding events of BCMA-directed therapies, thereby enhancing target cell killing.

[1017] The data strongly support the use of GSIs in combination with BCMA-targeted therapies, including but not limited to BCMA-targeting chimeric antigen receptor T cell therapy.

### Example 2

[1018] In this example, the effect of gamma secretase inhibitors on BCMA cell surface expression and BCMA shedding was investigated in vitro. Treatment of BCMA expressing cells with a gamma secretase inhibitor (GSI) prevented shedding of the receptor into cell culture supernatants, which in turn increased cell surface expression of the receptor in vitro.

### Materials and Methods

[1019] Target human cancer cell lines expressing various levels of human BCMA (NCI-H929^{[High]}, MM1S^{[med]}, U266B1^{[low]}) were all transduced to constitutively express luciferase, which is used to measure cell viability/survival with the BrightGlo reagent (Promega E2650). Target cells were plated 30,000 cells per well in a 96 well plate (Costar 3904) together with serial dilutions of a panel of gamma secretase inhibitors (Table 29). The plate was incubated at 37° C./5% CO₂ for 72 hours, followed by measurements of cell viability (BrightGlo, Promega # E2650) according to vendor protocol. In a replicate set of assay plates, cell culture supernatants were collected by centrifugation and quantified for levels of soluble BCMA by ELISA (R&D Systems, DY193), and the remaining cells were stained with a PE conjugated BCMA antibody (clone 19F2, Biolegend 357504) and analyzed by flow cytometry for BCMA cell surface expression levels.

TABLE 29
Gamma secretase inhibitors

| Gamma Secretase | | | |
|---|---|---|---|
| Inhibitor (GSI) | Developer | Supplier | item # |
| LY-450139 | Lilly/Elan | Novartis | NVP-ANJ-889 |
| (Semangacestat) | | | |
| PF-5212362 | Pfizer | Novartis | NVP-CGX-400 |
| (Begacestat, | (Wyeth) | | |
| GSI-953) | | | |
| BMS-708163 | BMS | Novartis | NVP-CHG-662 |
| (Avagacestat) | | | |
| LY-411575 | Lilly | Sigma | SML0506-5mg |
| PF-3084014 | Pfizer | Novartis | NVP-CHE-743 |
| BMS-299897 | BMS | R&D Systems | 2870/10 |
| DAPT | Lilly | Enzo | ALX-270-416-M005 |
| RO4929097 | Roche | Selleck | S1575-5MG |
| MK-0752 | Merck | Novartis | NVP-LJR-137 |

[1020] Results

[1021] Luminescence values obtained from the BrightGlo assay were normalized to percent viability by taking the ratio of values from treated over untreated and plotted in Spotfire. All the GSI compounds were well tolerated at all the concentrations used (FIG. 2).

[1022] Raw OD450 values from the BCMA ELISA were plotted together with the mean fluorescent intensity values from flow cytometry analysis of cells stained with anti-BCMA antibody, and are shown for MM1S cells treated with the various GSIs in FIG. 3. Table 30 summarizes the EC50 results of all the GSIs on the three BCMA-expressing cell lines.

TABLE 30
EC50 [nM] summary of GSI inhibition of shed/soluble
BCMA, and enhancement of membrane BCMA expression.

| | EC50, nM | | | | | |
|---|---|---|---|---|---|---|
| | H929 | | MM1S | | U266B1 | |
| | sBCMA | mBCMA | sBCMA | mBCMA | sBCMA | mBCMA |
| LY-450139 | 99.9 | 54.8 | 65.0 | 40.7 | 236.0 | 190.4 |
| PF-5212362 | 136.6 | 13.8 | 120.9 | 52.2 | 583.0 | 560.0 |
| BMS-708163 | 2.5 | 3.6 | 13.3 | 7.4 | 29.8 | 32.4 |
| LY-411575 | 0.2 | 0.1 | 0.1 | 0.0 | 0.1 | 0.1 |
| PF-3084014 | 34.8 | 31.6 | 32.2 | 36.6 | 67.2 | 70.4 |
| BMS-299897 | 528.1 | 151.6 | 799.8 | 484.9 | | 1687.7 |
| DAPT | 220.4 | 144.7 | 144.2 | 97.4 | 458.9 | 401.3 |
| RO4929097 | 3.0 | 4.4 | 4.6 | 3.2 | 6.2 | 10.1 |
| MK-0752 | 269.1 | 69.3 | 565.7 | 331.6 | 1056.8 | 1208.3 |

### DISCUSSION

[1023] It was demonstrated here that a broad panel of gamma secretase inhibitors, some reaching Phase III clinical trials, are all effective at inhibiting cleavage, and thereby shedding, of BCMA in vitro. This inhibition has been shown to result in increased membrane expression of BCMA in three different multiple myeloma cell lines, ideally maximizing the clinical efficacy of BCMA targeted therapies when used in combination. FIG. 2 suggests all of these inhibitors are well tolerated in vitro at effective concentrations.

[1024] Interestingly, all of the inhibitors show a correlation between effective concentrations that inhibit shedding of BCMA and that enhance membrane expression of BCMA. This correlation is exhibited by similar EC50 values in Table 30, as well as the overlapping infection points in FIG. 3. Among the panel of GSIs, efficacious concentrations vary considerably, with LY-411575 being the most potent, and BMS-299897 being the least. Effective concentrations also vary among the different cell lines tested, and may not necessarily be based on level of BCMA expression.

[1025] Taken together, these data strongly support the further development and use of gamma secretase inhibitors in combination with BCMA targeted therapies, including but not limited to BCMA-targeting chimeric antigen receptor T cell therapy.

### Example 3

[1026] Part I—BCMA Surface Expression is Enhanced Whereas Soluble BCMA is Reduced after GSI Treatment in Myeloma Cell Lines and Primary Samples.

### A—Analysis of BCMA Expression in MM Cell Lines and Primary Samples by Flow Cytometry

### Materials and Methods:

[1027] Multiple myeloma (MM) cell lines U266 or RPMI 8226 were incubated with several concentrations (3 μM-25 μM) of Ly 411575 gamma secretase inhibitor (Miltenyi) for 48 hrs. Primary samples from MM patients (bone marrow) were incubated with 50 μM of Ly 411575 gamma secretase inhibitor for 4 hrs (Miltenyi). Cells were stained with Human BCMA/CD269-PE (clone 19F2, Biolegend 357503) or mouse IgG2a, κ PE isotype control. Primary samples from multiple myeloma patients were also stained with Live/dead dye (LifeTechnologies, L34960), and CD138-APC (eBioscience 17-1389-42). Data from stained samples were collected using a BD Fortessa cytometer. Flow cytometric analysis was performed using Flowjo v10 (Tree Star Inc).

### Results:

[1028] BCMA was detected on the surface of the MM cell lines and primary samples as shown in FIGS. 4A and 4B. Moreover, BCMA expression was enhanced after 48 hr treatment on MM cell lines or 4 hrs in primary samples, suggesting that utilizing the inhibitor one can regulate the amount of BCMA on the surface of MM cell lines (FIGS. 4A and 4B). These results provide strong support for the relevance of BCMA as a target in MM.

### B—Analysis of Soluble BCMA in MM Cell Lines by ELISA

### Materials and Methods:

[1029] MM cell lines U266 or RPMI 8226 were incubated with several concentrations (6 μM-100 μM) of Ly 411575 gamma secretase inhibitor (Miltenyi) for 48 hrs. Supernatants were collected and secreted BCMA was measured using a sandwich ELISA (BCMA/TNFRSF17 ELISA Duo set, R&D Systems).

### Results:

[1030] The ELISA showed that the gamma secretase inhibitor LY-411575 blocked the production of soluble BCMA, although the magnitude of its effect depended on the cell line that was tested. On the U266 cell line, LY-411575 slightly reduced the amount of soluble BCMA in the supernatant (FIG. 5A). Cells without treatment secreted 1250 pg/mL of BCMA, whereas cells treated secreted between 800 and 1100 pg/ml (FIG. 5A). On the RPMI 8226 cell line, LY-411575 drastically reduced the amount of soluble BCMA in the supernatant (FIG. 5B). Cells without treatment secreted 1350 pg/mL of BCMA, whereas cells treated secreted 200 pg/ml (FIG. 5B). These results showed that soluble BCMA would vary depending on the type of cell line and can be regulated by GSI treatment.

### Part II—In Vitro Evaluation of GSI Treatment on T Cell Proliferation.

### Material and Method:

[1031] Fresh isolated human T cells from healthy donors were cultured in RPMI 1640 medium with 10% FBS and stimulated with anti-CD3/anti-CD28 Dynabeads (invitrogen) in the presence or absence of several concentrations of GSI (12 μM-100 μM) during the culture expansion. Stimulated T cells were fed and split every 2-3 days to 0.8×10⁶ cells/ml and GSI was added to the cultures during the expansion (7-9 days) or until cells were rested as determined by decreased rate of cell division and a decrease in mean cellular volume to <˜300 fl. Cellular volume (FL) and number of cells were measured every 3 days using a Coulter Multisizer 3 (Beckman Coulter).

### Result:

[1032] Proliferation and number of T cells were not affected when incubated with GSI at doses lower than 100 μM (FIGS. 6A and 6B).

### Part III—In Vitro Evaluation of GSI Treatment on T Cell Function.

### A—BCMA-CARs are Efficiently Expressed on T Cells

### Material and Method:

[1033] Fresh isolated human T cells from healthy donors were transduced with lentiviral vector supernatants encoding the BCMA3NP CAR and anti-BCMA CAR expression was evaluated by flow cytometry. Briefly, T cells were cultured in RPMI 1640 medium with 10% FBS and stimulated with anti-CD3/anti-CD28 Dynabeads (invitrogen). 24 hrs after stimulation, T cells were transduced with the BCMA CAR lentiviral vector supernatants. Mock-transduced T cells (NTD) were used as a negative control. 4-6 days after lentiviral transduction, T cells were stained with Biotin Goat-anti mouse followed by SAV-PE and CAR expression was evaluated by flow cytometry (FortessaC, BD). Flow cytometric analysis was carried out by using Flowjo v10 (Tree Star Inc).

### Result:

[1034] After transduction, BCMA CARs were efficiently expressed on the cell surface of the transduced T cells (data not shown).

### B—in the Presence of Cognate Target Antigen, Anti-BCMA CAR-Transduced T Cells (BCMA CARTs) Show Enhanced Cytotoxic Activity on Myeloma Cell Lines.

### Material and Method:

[1035] The ability of BCMA CAR T cells to kill BCMA-expressing target cells was evaluated using a 51Cr release-assay. Briefly, target MM cell line U266, a positive control cell line K562-BCMA (ectopically expressing human BCMA), or a negative control cell line K562 were cultured for 48 hr in presence or absence of 10 μM of GSI, then washed and labeled with 51Cr (Sodium Dichromate salt), washed and co-cultured with effector BCMA CAR T cells or NTD T cells at different effector/target ratios. Supernatants were collected at 4-hrs, and placed into 96 well Lumaplates (Perkin Elmer). The amount of 51Cr released from the labeled target cells was measured on a liquid scintillation counter (MicroBeta trilux, Perkin Elmer). Target cells incubated in medium alone or with 1% SDS were used to determine spontaneous (S) or maximum (M) 51Cr release. Percentage of specific lysis was calculated as follow: 100×(cpm experimental release−cpm S release)/(cpm M release−cpm S release).

### Result:

[1036] BCMA-CAR-transduced T cells were able to induce lysis of K562-BCMA cells and BCMA-expressing multiple myeloma cells lines with little activity towards the BCMA negative cell lineK562. γ-secretase inhibitor treatment enhanced in vitro cytotoxicity of CAR T cells (FIGS. 7A-7C).

### Part IV—In Vivo Evaluation of BCMA-CAR T Cells for MM

### Material and Method:

[1037] Based upon in vitro data supporting enhanced expression of BCMA on cell surface after GSI treatment, the anti-tumor activity before and after GSI treatment was evaluated in a preclinical animal model of multiple myeloma using the U266 cell line. U266 cells were engineered to express Click-beetle Green luciferase (CB-G Luc+) to track tumor progression by bioluminescent in vivo imaging (IVIS) and Living Image software (Perkin Elmer) (FIG. 8). 4 weeks after injection of CB-G Luc+U266 NSG recipients were treated with GSI (10 mg/kg) by IP injection every day for 4 days. On day 5, mice were IV injected with BCMA or NTD T and the tumor burden was evaluated by optical imaging (FIGS. 9A-9D).

### Result:

[1038] T cells expressing BCMA3NP induced reduction in the tumor burden of mice bearing U266 (FIG. 9C). After GSI treatment, tumor burden was further reduced and improved clinical disease activity was observed (FIG. 9D).

### EQUIVALENTS

[1039] The disclosures of each and every patent, patent application, and publication cited herein are hereby incorporated herein by reference in their entirety. While this invention has been disclosed with reference to specific aspects, it is apparent that other aspects and variations of this invention may be devised by others skilled in the art without departing from the true spirit and scope of the invention. The appended claims are intended to be construed to include all such aspects and equivalent variations.

The application's sequence listing, which the Patent Office published only in electronic form, follows.

SEQUENCE LISTING (1154 sequences)

SEQ ID NO: 1 - protein, 21 aa, Artificial Sequence
  source: /note="Description of Artificial Sequence: Synthetic peptide"
MALPVTALLLPLALLLHAARP

SEQ ID NO: 2 - protein, 45 aa, Artificial Sequence
  source: /note="Description of Artificial Sequence: Synthetic polypeptide"
TTTPAPRPPTPAPTIASQPLSLRPEACRPAAGGAVHTRGLDFACD

SEQ ID NO: 3 - protein, 230 aa, Artificial Sequence
  source: /note="Description of Artificial Sequence: Synthetic polypeptide"
ESKYGPPCPPCPAPEFLGGPSVFLFPPKPKDTLMISRTPEVTCVVVDVSQEDPEVQFNWYVDGVEVHNAKTKPREEQFNSTYRVVSVLTVLHQDWLNGKEYKCKVSNKGLPSSIEKTISKAKGQPREPQVYTLPPSQEEMTKNQVSLTCLVKGFYPSDIAVEWESNGQPENNYKTTPPVLDSDGSFFLYSRLTVDKSRWQEGNVFSCSVMHEALHNHYTQKSLSLSLGKM

SEQ ID NO: 4 - protein, 282 aa, Artificial Sequence
  source: /note="Description of Artificial Sequence: Synthetic polypeptide"
RWPESPKAQASSVPTAQPQAEGSLAKATTAPATTRNTGRGGEEKKKEKEKEEQEERETKTPECPSHTQPLGVYLLTPAVQDLWLRDKATFTCFVVGSDLKDAHLTWEVAGKVPTGGVEEGLLERHSNGSQSQHSRLTLPRSLWNAGTSVTCTLNHPSLPPQRLMALREPAAQAPVKLSLNLLASSDPPEAASWLLCEVSGFSPPNILLMWLEDQREVNTSGFAPARPPPQPGSTTFWAWSVLRVPAPPSPQPATYTCVVSHEDSRTLLNASRSLEVSYVTDH

SEQ ID NO: 5 - protein, 10 aa, Artificial Sequence
  source: /note="Description of Artificial Sequence: Synthetic peptide"
GGGGSGGGGS

SEQ ID NO: 6 - protein, 24 aa, Artificial Sequence
  source: /note="Description of Artificial Sequence: Synthetic peptide"
IYIWAPLAGTCGVLLLSLVITLYC

SEQ ID NO: 7 - protein, 42 aa, Artificial Sequence
  source: /note="Description of Artificial Sequence: Synthetic polypeptide"
KRGRKKLLYIFKQPFMRPVQTTQEEDGCSCRFPEEEEGGCEL

SEQ ID NO: 8 - protein, 48 aa, Artificial Sequence
  source: /note="Description of Artificial Sequence: Synthetic polypeptide"
QRRKYRSNKGESPVEPAEPCRYSCPREEEGSTIPIQEDYRKPEPACSP

SEQ ID NO: 9 - protein, 112 aa, Artificial Sequence
  source: /note="Description of Artificial Sequence: Synthetic polypeptide"
RVKFSRSADAPAYKQGQNQLYNELNLGRREEYDVLDKRRGRDPEMGGKPRRKNPQEGLYNELQKDKMAEAYSEIGMKGERRRGKGHDGLYQGLSTATKDTYDALHMQALPPR

SEQ ID NO: 10 - protein, 112 aa, Homo sapiens
RVKFSRSADAPAYQQGQNQLYNELNLGRREEYDVLDKRRGRDPEMGGKPRRKNPQEGLYNELQKDKMAEAYSEIGMKGERRRGKGHDGLYQGLSTATKDTYDALHMQALPPR

SEQ ID NO: 11 - DNA, 1184 bp, Artificial Sequence
  source: /note="Description of Artificial Sequence: Synthetic polynucleotide"
cgtgaggctccggtgcccgtcagtgggcagagcgcacatcgcccacagtccccgagaagttggggggaggggtcggcaattgaaccggtgcctagagaaggtggcgcggggtaaactgggaaagtgatgtcgtgtactggctccgcctttttcccgagggtgggggagaaccgtatataagtgcagtagtcgccgtgaacgttctttttcgcaacgggtttgccgccagaacacaggtaagtgccgtgtgtggttcccgcgggcctggcctctttacgggttatggcccttgcgtgccttgaattacttccacctggctgcagtacgtgattcttgatcccgagcttcgggttggaagtgggtgggagagttcgaggccttgcgcttaaggagccccttcgcctcgtgcttgagttgaggcctggcctgggcgctggggccgccgcgtgcgaatctggtggcaccttcgcgcctgtctcgctgctttcgataagtctctagccatttaaaatttttgatgacctgctgcgacgctttttttctggcaagatagtcttgtaaatgcgggccaagatctgcacactggtatttcggtttttggggccgcgggcggcgacggggcccgtgcgtcccagcgcacatgttcggcgaggcggggcctgcgagcgcggccaccgagaatcggacgggggtagtctcaagctggccggcctgctctggtgcctggcctcgcgccgccgtgtatcgccccgccctgggcggcaaggctggcccggtcggcaccagttgcgtgagcggaaagatggccgcttcccggccctgctgcagggagctcaaaatggaggacgcggcgctcgggagagcgggcgggtgagtcacccacacaaaggaaaagggcctttccgtcctcagccgtcgcttcatgtgactccacggagtaccgggcgccgtccaggcacctcgattagttctcgagcttttggagtacgtcgtctttaggttggggggaggggttttatgcgatggagtttccccacactgagtgggtggagactgaagttaggccagcttggcacttgatgtaattctccttggaatttgccctttttgagtttggatcttggttcattctcaagcctcagacagtggttcaaagtttttttcttccatttcaggtgtcgtga

SEQ ID NO: 12 - DNA, 63 bp, Artificial Sequence
  source: /note="Description of Artificial Sequence: Synthetic oligonucleotide"
atggccctgcctgtgacagccctgctgctgcctctggctctgctgctgcatgccgctagaccc

SEQ ID NO: 13 - DNA, 135 bp, Artificial Sequence
  source: /note="Description of Artificial Sequence: Synthetic polynucleotide"
accacgacgccagcgccgcgaccaccaacaccggcgcccaccatcgcgtcgcagcccctgtccctgcgcccagaggcgtgccggccagcggcggggggcgcagtgcacacgagggggctggacttcgcctgtgat

SEQ ID NO: 14 - DNA, 690 bp, Artificial Sequence
  source: /note="Description of Artificial Sequence: Synthetic polynucleotide"
gagagcaagtacggccctccctgccccccttgccctgcccccgagttcctgggcggacccagcgtgttcctgttcccccccaagcccaaggacaccctgatgatcagccggacccccgaggtgacctgtgtggtggtggacgtgtcccaggaggaccccgaggtccagttcaactggtacgtggacggcgtggaggtgcacaacgccaagaccaagccccgggaggagcagttcaatagcacctaccgggtggtgtccgtgctgaccgtgctgcaccaggactggctgaacggcaaggaatacaagtgtaaggtgtccaacaagggcctgcccagcagcatcgagaaaaccatcagcaaggccaagggccagcctcgggagccccaggtgtacaccctgccccctagccaagaggagatgaccaagaaccaggtgtccctgacctgcctggtgaagggcttctaccccagcgacatcgccgtggagtgggagagcaacggccagcccgagaacaactacaagaccaccccccctgtgctggacagcgacggcagcttcttcctgtacagccggctgaccgtggacaagagccggtggcaggagggcaacgtctttagctgctccgtgatgcacgaggccctgcacaaccactacacccagaagagcctgagcctgtccctgggcaagatg

SEQ ID NO: 15 - DNA, 847 bp, Artificial Sequence
  source: /note="Description of Artificial Sequence: Synthetic polynucleotide"
aggtggcccgaaagtcccaaggcccaggcatctagtgttcctactgcacagccccaggcagaaggcagcctagccaaagctactactgcacctgccactacgcgcaatactggccgtggcggggaggagaagaaaaaggagaaagagaaagaagaacaggaagagagggagaccaagacccctgaatgtccatcccatacccagccgctgggcgtctatctcttgactcccgcagtacaggacttgtggcttagagataaggccacctttacatgtttcgtcgtgggctctgacctgaaggatgcccatttgacttgggaggttgccggaaaggtacccacagggggggttgaggaagggttgctggagcgccattccaatggctctcagagccagcactcaagactcacccttccgagatccctgtggaacgccgggacctctgtcacatgtactctaaatcatcctagcctgcccccacagcgtctgatggcccttagagagccagccgcccaggcaccagttaagcttagcctgaatctgctcgccagtagtgatcccccagaggccgccagctggctcttatgcgaagtgtccggctttagcccgcccaacatcttgctcatgtggctggaggaccagcgagaagtgaacaccagcggcttcgctccagcccggcccccaccccagccgggttctaccacattctgggcctggagtgtcttaagggtcccagcaccacctagcccccagccagccacatacacctgtgttgtgtcccatgaagatagcaggaccctgctaaatgcttctaggagtctggaggtttcctacgtgactgaccatt

SEQ ID NO: 16 - DNA, 30 bp, Artificial Sequence
  source: /note="Description of Artificial Sequence: Synthetic oligonucleotide"
ggtggcggaggttctggaggtggaggttcc

SEQ ID NO: 17 - DNA, 72 bp, Artificial Sequence
  source: /note="Description of Artificial Sequence: Synthetic oligonucleotide"
atctacatctgggcgcccttggccgggacttgtggggtccttctcctgtcactggttatcaccctttactgc

SEQ ID NO: 18 - DNA, 126 bp, Artificial Sequence
  source: /note="Description of Artificial Sequence: Synthetic polynucleotide"
aaacggggcagaaagaaactcctgtatatattcaaacaaccatttatgagaccagtacaaactactcaagaggaagatggctgtagctgccgatttccagaagaagaagaaggaggatgtgaactg

SEQ ID NO: 19 - DNA, 123 bp, Artificial Sequence
  source: /note="Description of Artificial Sequence: Synthetic polynucleotide"
aggagtaagaggagcaggctcctgcacagtgactacatgaacatgactccccgccgccccgggcccacccgcaagcattaccagccctatgccccaccacgcgacttcgcagcctatcgctcc

SEQ ID NO: 20 - DNA, 336 bp, Artificial Sequence
  source: /note="Description of Artificial Sequence: Synthetic polynucleotide"
agagtgaagttcagcaggagcgcagacgcccccgcgtacaagcagggccagaaccagctctataacgagctcaatctaggacgaagagaggagtacgatgttttggacaagagacgtggccgggaccctgagatggggggaaagccgagaaggaagaaccctcaggaaggcctgtacaatgaactgcagaaagataagatggcggaggcctacagtgagattgggatgaaaggcgagcgccggaggggcaaggggcacgatggcctttaccagggtctcagtacagccaccaaggacacctacgacgcccttcacatgcaggccctgccccctcgc

SEQ ID NO: 21 - DNA, 336 bp, Homo sapiens
agagtgaagttcagcaggagcgcagacgcccccgcgtaccagcagggccagaaccagctctataacgagctcaatctaggacgaagagaggagtacgatgttttggacaagagacgtggccgggaccctgagatggggggaaagccgagaaggaagaaccctcaggaaggcctgtacaatgaactgcagaaagataagatggcggaggcctacagtgagattgggatgaaaggcgagcgccggaggggcaaggggcacgatggcctttaccagggtctcagtacagccaccaaggacacctacgacgcccttcacatgcaggccctgccccctcgc

SEQ ID NO: 22 - protein, 373 aa, Artificial Sequence
  source: /note="Description of Artificial Sequence: Synthetic polypeptide"
PGWFLDSPDRPWNPPTFSPALLVVTEGDNATFTCSFSNTSESFVLNWYRMSPSNQTDKLAAFPEDRSQPGQDCRFRVTQLPNGRDFHMSVVRARRNDSGTYLCGAISLAPKAQIKESLRAELRVTERRAEVPTAHPSPSPRPAGQFQTLVTTTPAPRPPTPAPTIASQPLSLRPEACRPAAGGAVHTRGLDFACDIYIWAPLAGTCGVLLLSLVITLYCKRGRKKLLYIFKQPFMRPVQTTQEEDGCSCRFPEEEEGGCELRVKFSRSADAPAYKQGQNQLYNELNLGRREEYDVLDKRRGRDPEMGGKPRRKNPQEGLYNELQKDKMAEAYSEIGMKGERRRGKGHDGLYQGLSTATKDTYDALHMQALPPR

SEQ ID NO: 23 - DNA, 1182 bp, Artificial Sequence
  source: /note="Description of Artificial Sequence: Synthetic polynucleotide"
atggccctccctgtcactgccctgcttctccccctcgcactcctgctccacgccgctagaccacccggatggtttctggactctccggatcgcccgtggaatcccccaaccttctcaccggcactcttggttgtgactgagggcgataatgcgaccttcacgtgctcgttctccaacacctccgaatcattcgtgctgaactggtaccgcatgagcccgtcaaaccagaccgacaagctcgccgcgtttccggaagatcggtcgcaaccgggacaggattgtcggttccgcgtgactcaactgccgaatggcagagacttccacatgagcgtggtccgcgctaggcgaaacgactccgggacctacctgtgcggagccatctcgctggcgcctaaggcccaaatcaaagagagcttgagggccgaactgagagtgaccgagcgcagagctgaggtgccaactgcacatccatccccatcgcctcggcctgcggggcagtttcagaccctggtcacgaccactccggcgccgcgcccaccgactccggccccaactatcgcgagccagcccctgtcgctgaggccggaagcatgccgccctgccgccggaggtgctgtgcatacccggggattggacttcgcatgcgacatctacatttgggctcctctcgccggaacttgtggcgtgctccttctgtccctggtcatcaccctgtactgcaagcggggtcggaaaaagcttctgtacattttcaagcagcccttcatgaggcccgtgcaaaccacccaggaggaggacggttgctcctgccggttccccgaagaggaagaaggaggttgcgagctgcgcgtgaagttctcccggagcgccgacgcccccgcctataagcagggccagaaccagctgtacaacgaactgaacctgggacggcgggaagagtacgatgtgctggacaagcggcgcggccgggaccccgaaatgggcgggaagcctagaagaaagaaccctcaggaaggcctgtataacgagctgcagaaggacaagatggccgaggcctactccgaaattgggatgaagggagagcggcggaggggaaaggggcacgacggcctgtaccaaggactgtccaccgccaccaaggacacatacgatgccctgcacatgcaggcccttccccctcgc

SEQ ID NO: 24 - protein, 394 aa, Artificial Sequence
  source: /note="Description of Artificial Sequence: Synthetic polypeptide"
MALPVTALLLPLALLLHAARPPGWFLDSPDRPWNPPTFSPALLVVTEGDNATFTCSFSNTSESFVLNWYRMSPSNQTDKLAAFPEDRSQPGQDCRFRVTQLPNGRDFHMSVVRARRNDSGTYLCGAISLAPKAQIKESLRAELRVTERRAEVPTAHPSPSPRPAGQFQTLVTTTPAPRPPTPAPTIASQPLSLRPEACRPAAGGAVHTRGLDFACDIYIWAPLAGTCGVLLLSLVITLYCKRGRKKLLYIFKQPFMRPVQTTQEEDGCSCRFPEEEEGGCELRVKFSRSADAPAYKQGQNQLYNELNLGRREEYDVLDKRRGRDPEMGGKPRRKNPQEGLYNELQKDKMAEAYSEIGMKGERRRGKGHDGLYQGLSTATKDTYDALHMQALPPR

SEQ ID NO: 25 - protein, 5 aa, Artificial Sequence
  source: /note="Description of Artificial Sequence: Synthetic peptide"
GGGGS

SEQ ID NO: 26 - protein, 30 aa, Artificial Sequence
  source: /note="Description of Artificial Sequence: Synthetic polypeptide"
  MISC_FEATURE (1)..(30): /note="This sequence may encompass 1-6 'Gly Gly Gly Gly Ser' repeating units"
  source: /note="See specification as filed for detailed description of substitutions and preferred embodiments"
GGGGSGGGGSGGGGSGGGGSGGGGSGGGGS

SEQ ID NO: 27 - protein, 20 aa, Artificial Sequence
  source: /note="Description of Artificial Sequence: Synthetic peptide"
GGGGSGGGGSGGGGSGGGGS

SEQ ID NO: 28 - protein, 15 aa, Artificial Sequence
  source: /note="Description of Artificial Sequence: Synthetic peptide"
GGGGSGGGGSGGGGS

SEQ ID NO: 29 - protein, 4 aa, Artificial Sequence
  source: /note="Description of Artificial Sequence: Synthetic peptide"
GGGS

SEQ ID NO: 30 - DNA, 5000 bp, Artificial Sequence
  source: /note="Description of Artificial Sequence: Synthetic polynucleotide"
  misc_feature (1)..(5000): /note="This sequence may encompass 50-5000 nucleotides"
  source: /note="See specification as filed for detailed description of substitutions and preferred embodiments"
aaaaaaaaaaaaaaaaaaaaaaaaaaaaaaaaaaaaaaaaaaaaaaaaaaaaaaaaaaaaaaaaaaaaaaaaaaaaaaaaaaaaaaaaaaaaaaaaaaaaaaaaaaaaaaaaaaaaaaaaaaaaaaaaaaaaaaaaaaaaaaaaaaaaaaaaaaaaaaaaaaaaaaaaaaaaaaaaaaaaaaaaaaaaaaaaaaaaaaaaaaaaaaaaaaaaaaaaaaaaaaaaaaaaaaaaaaaaaaaaaaaaaaaaaaaaaaaaaaaaaaaaaaaaaaaaaaaaaaaaaaaaaaaaaaaaaaaaaaaaaaaaaaaaaaaaaaaaaaaaaaaaaaaaaaaaaaaaaaaaaaaaaaaaaaaaaaaaaaaaaaaaaaaaaaaaaaaaaaaaaaaaaaaaaaaaaaaaaaaaaaaaaaaaaaaaaaaaaaaaaaaaaaaaaaaaaaaaaaaaaaaaaaaaaaaaaaaaaaaaaaaaaaaaaaaaaaaaaaaaaaaaaaaaaaaaaaaaaaaaaaaaaaaaaaaaaaaaaaaaaaaaaaaaaaaaaaaaaaaaaaaaaaaaaaaaaaaaaaaaaaaaaaaaaaaaaaaaaaaaaaaaaaaaaaaaaaaaaaaaaaaaaaaaaaaaaaaaaaaaaaaaaaaaaaaaaaaaaaaaaaaaaaaaaaaaaaaaaaaaaaaaaaaaaaaaaaaaaaaaaaaaaaaaaaaaaaaaaaaaaaaaaaaaaaaaaaaaaaaaaaaaaaaaaaaaaaaaaaaaaaaaaaaaaaaaaaaaaaaaaaaaaaaaaaaaaaaaaaaaaaaaaaaaaaaaaaaaaaaaaaaaaaaaaaaaaaaaaaaaaaaaaaaaaaaaaaaaaaaaaaaaaaaaaaaaaaaaaaaaaaaaaaaaaaaaaaaaaaaaaaaaaaaaaaaaaaaaaaaaaaaaaaaaaaaaaaaaaaaaaaaaaaaaaaaaaaaaaaaaaaaaaaaaaaaaaaaaaaaaaaaaaaaaaaaaaaaaaaaaaaaaaaaaaaaaaaaaaaaaaaaaaaaaaaaaaaaaaaaaaaaaaaaaaaaaaaaaaaaaaaaaaaaaaaaaaaaaaaaaaaaaaaaaaaaaaaaaaaaaaaaaaaaaaaaaaaaaaaaaaaaaaaaaaaaaaaaaaaaaaaaaaaaaaaaaaaaaaaaaaaaaaaaaaaaaaaaaaaaaaaaaaaaaaaaaaaaaaaaaaaaaaaaaaaaaaaaaaaaaaaaaaaaaaaaaaaaaaaaaaaaaaaaaaaaaaaaaaaaaaaaaaaaaaaaaaaaaaaaaaaaaaaaaaaaaaaaaaaaaaaaaaaaaaaaaaaaaaaaaaaaaaaaaaaaaaaaaaaaaaaaaaaaaaaaaaaaaaaaaaaaaaaaaaaaaaaaaaaaaaaaaaaaaaaaaaaaaaaaaaaaaaaaaaaaaaaaaaaaaaaaaaaaaaaaaaaaaaaaaaaaaaaaaaaaaaaaaaaaaaaaaaaaaaaaaaaaaaaaaaaaaaaaaaaaaaaaaaaaaaaaaaaaaaaaaaaaaaaaaaaaaaaaaaaaaaaaaaaaaaaaaaaaaaaaaaaaaaaaaaaaaaaaaaaaaaaaaaaaaaaaaaaaaaaaaaaaaaaaaaaaaaaaaaaaaaaaaaaaaaaaaaaaaaaaaaaaaaaaaaaaaaaaaaaaaaaaaaaaaaaaaaaaaaaaaaaaaaaaaaaaaaaaaaaaaaaaaaaaaaaaaaaaaaaaaaaaaaaaaaaaaaaaaaaaaaaaaaaaaaaaaaaaaaaaaaaaaaaaaaaaaaaaaaaaaaaaaaaaaaaaaaaaaaaaaaaaaaaaaaaaaaaaaaaaaaaaaaaaaaaaaaaaaaaaaaaaaaaaaaaaaaaaaaaaaaaaaaaaaaaaaaaaaaaaaaaaaaaaaaaaaaaaaaaaaaaaaaaaaaaaaaaaaaaaaaaaaaaaaaaaaaaaaaaaaaaaaaaaaaaaaaaaaaaaaaaaaaaaaaaaaaaaaaaaaaaaaaaaaaaaaaaaaaaaaaaaaaaaaaaaaaaaaaaaaaaaaaaaaaaaaaaaaaaaaaaaaaaaaaaaaaaaaaaaaaaaaaaaaaaaaaaaaaaaaaaaaaaaaaaaaaaaaaaaaaaaaaaaaaaaaaaaaaaaaaaaaaaaaaaaaaaaaaaaaaaaaaaaaaaaaaaaaaaaaaaaaaaaaaaaaaaaaaaaaaaaaaaaaaaaaaaaaaaaaaaaaaaaaaaaaaaaaaaaaaaaaaaaaaaaaaaaaaaaaaaaaaaaaaaaaaaaaaaaaaaaaaaaaaaaaaaaaaaaaaaaaaaaaaaaaaaaaaaaaaaaaaaaaaaaaaaaaaaaaaaaaaaaaaaaaaaaaaaaaaaaaaaaaaaaaaaaaaaaaaaaaaaaaaaaaaaaaaaaaaaaaaaaaaaaaaaaaaaaaaaaaaaaaaaaaaaaaaaaaaaaaaaaaaaaaaaaaaaaaaaaaaaaaaaaaaaaaaaaaaaaaaaaaaaaaaaaaaaaaaaaaaaaaaaaaaaaaaaaaaaaaaaaaaaaaaaaaaaaaaaaaaaaaaaaaaaaaaaaaaaaaaaaaaaaaaaaaaaaaaaaaaaaaaaaaaaaaaaaaaaaaaaaaaaaaaaaaaaaaaaaaaaaaaaaaaaaaaaaaaaaaaaaaaaaaaaaaaaaaaaaaaaaaaaaaaaaaaaaaaaaaaaaaaaaaaaaaaaaaaaaaaaaaaaaaaaaaaaaaaaaaaaaaaaaaaaaaaaaaaaaaaaaaaaaaaaaaaaaaaaaaaaaaaaaaaaaaaaaaaaaaaaaaaaaaaaaaaaaaaaaaaaaaaaaaaaaaaaaaaaaaaaaaaaaaaaaaaaaaaaaaaaaaaaaaaaaaaaaaaaaaaaaaaaaaaaaaaaaaaaaaaaaaaaaaaaaaaaaaaaaaaaaaaaaaaaaaaaaaaaaaaaaaaaaaaaaaaaaaaaaaaaaaaaaaaaaaaaaaaaaaaaaaaaaaaaaaaaaaaaaaaaaaaaaaaaaaaaaaaaaaaaaaaaaaaaaaaaaaaaaaaaaaaaaaaaaaaaaaaaaaaaaaaaaaaaaaaaaaaaaaaaaaaaaaaaaaaaaaaaaaaaaaaaaaaaaaaaaaaaaaaaaaaaaaaaaaaaaaaaaaaaaaaaaaaaaaaaaaaaaaaaaaaaaaaaaaaaaaaaaaaaaaaaaaaaaaaaaaaaaaaaaaaaaaaaaaaaaaaaaaaaaaaaaaaaaaaaaaaaaaaaaaaaaaaaaaaaaaaaaaaaaaaaaaaaaaaaaaaaaaaaaaaaaaaaaaaaaaaaaaaaaaaaaaaaaaaaaaaaaaaaaaaaaaaaaaaaaaaaaaaaaaaaaaaaaaaaaaaaaaaaaaaaaaaaaaaaaaaaaaaaaaaaaaaaaaaaaaaaaaaaaaaaaaaaaaaaaaaaaaaaaaaaaaaaaaaaaaaaaaaaaaaaaaaaaaaaaaaaaaaaaaaaaaaaaaaaaaaaaaaaaaaaaaaaaaaaaaaaaaaaaaaaaaaaaaaaaaaaaaaaaaaaaaaaaaaaaaaaaaaaaaaaaaaaaaaaaaaaaaaaaaaaaaaaaaaaaaaaaaaaaaaaaaaaaaaaaaaaaaaaaaaaaaaaaaaaaaaaaaaaaaaaaaaaaaaaaaaaaaaaaaaaaaaaaaaaaaaaaaaaaaaaaaaaaaaaaaaaaaaaaaaaaaaaaaaaaaaaaaaaaaaaaaaaaaaaaaaaaaaaaaaaaaaaaaaaaaaaaaaaaaaaaaaaaaaaaaaaaaaaaaaaaaaaaaaaaaaaaaaaaaaaaaaaaaaaaaaaaaaaaaaaaaaaaaaaaaaaaaaaaaaaaaaaaaaaaaaaaaaaaaaaaaaaaaaaaaaaaaaaaaaaaaaaaaaaaaaaaaaaaaaaaaaaaaaaaaaaaaaaaaaaaaaaaaaaaaaaaaaaaaaaaaaaaaaaaaaaaaaaaaaaaaaaaaaaaaaaaaaaaaaaaaaaaaaaaaaaaaaaaaaaaaaaaaaaaaaaaaaaaaaaaaaaaaaaaaaaaaaaaaaaaaaaaaaaaaaaaaaaaaaaaaaaaaaaaaaaaaaaaaaaaaaaaaaaaaaaaaaaaaaaaaaaaaaaaaaaaaaaaaaaaaaaaaaaaaaaaaaaaaaaaaaaaaaaaaaaaaaaaaaaaaaaaaaaaaaaaaaaaaaaaaaaaaaaaaaaaaaaaaaaaaaaaaaaaaaaaaaaaaaaaaaaaaaaaaaaaaaaaaaaaaaaaaaaaaaaaaaaaaaaaaaaaaaaaaaaaaaaaaaaaaaaaaaaaaaaaaaaaaaaaaaaaaaaaaaaaaaaaaaaaaaaaaaaaaaaaaaaaaaaaaaaaaaaaaaaaaaaaaaaaaaaaaaaaaaaaaaaaaaaaaaaaaaaaaaaaaaaaaaaaaaaaaaaaaaaaaaaaaaaaaaaaaaaaaaaaaaaaaaaaaaaaaaaaaaaaaaaaaaaaaaaaaaaaaaaaaaaaaaaaaaaaaaaaaaaaaaaaaaaaaaaaaaaaaaaaaaaaaaaaaaaaaaaaaaaaaaaaaaaaaaaaaaaaaaaaaaaaaaaaaaaaaaaaaaaaaaaaaaaaaaaaaaaaaaaaaaaaaaaaaaaaaaaaaaaaaaaaaaaaaaaaaaaaaaaaaaaaaaaaaaaaaaaaaaaaaaaaaaaaaaaaaaaaaaaaaaaaaaaaaaaaaaaaaaaaaaaaaaaaaaaaaaaaaaaaaaaaaaaaaaaaaaaaaaaaaaaaaaaaaaaaaaaaaaaaaaaaaaaaaaaaaaaaaaaaaaaaaaaaaaaaaaaaaaaaaaaaaaaaaaaaaaaaaaaaaaaaaaaaaaaaaaaaaaaaaaaaaaaaaaaaaaaaaaaaaaaaaaaaaaaaaaaaaaaaaaaaaaaaaaaaaaaaaaaaaaaaaaaaaaaaaaaaaaaaaaaaaaaaaaaaaaaaaaaaaaaaaaaaaaaaaaaaaaaaaaaaaaaaaaaaaaaaaaaaaaaaaaaaaaaaaaaaaaaaaaaaaaaaaaaaaaaaaaaaaaaaaaaaaaaaaaaaaaaaaaaaaaaaaaaaaaaaaaaaaaaaaaaaaaaaaaaaaaaaaaaaa

SEQ ID NO: 31 - DNA, 100 bp, Artificial Sequence
  source: /note="Description of Artificial Sequence: Synthetic polynucleotide"
tttttttttttttttttttttttttttttttttttttttttttttttttttttttttttttttttttttttttttttttttttttttttttttttttttt

SEQ ID NO: 32 - DNA, 5000 bp, Artificial Sequence
  source: /note="Description of Artificial Sequence: Synthetic polynucleotide"
  misc_feature (1)..(5000): /note="This sequence may encompass 50-5000 nucleotides"
  source: /note="See specification as filed for detailed description of substitutions and preferred embodiments"
tttttttttttttttttttttttttttttttttttttttttttttttttttttttttttttttttttttttttttttttttttttttttttttttttttttttttttttttttttttttttttttttttttttttttttttttttttttttttttttttttttttttttttttttttttttttttttttttttttttttttttttttttttttttttttttttttttttttttttttttttttttttttttttttttttttttttttttttttttttttttttttttttttttttttttttttttttttttttttttttttttttttttttttttttttttttttttttttttttttttttttttttttttttttttttttttttttttttttttttttttttttttttttttttttttttttttttttttttttttttttttttttttttttttttttttttttttttttttttttttttttttttttttttttttttttttttttttttttttttttttttttttttttttttttttttttttttttttttttttttttttttttttttttttttttttttttttttttttttttttttttttttttttttttttttttttttttttttttttttttttttttttttttttttttttttttttttttttttttttttttttttttttttttttttttttttttttttttttttttttttttttttttttttttttttttttttttttttttttttttttttttttttttttttttttttttttttttttttttttttttttttttttttttttttttttttttttttttttttttttttttttttttttttttttttttttttttttttttttttttttttttttttttttttttttttttttttttttttttttttttttttttttttttttttttttttttttttttttttttttttttttttttttttttttttttttttttttttttttttttttttttttttttttttttttttttttttttttttttttttttttttttttttttttttttttttttttttttttttttttttttttttttttttttttttttttttttttttttttttttttttttttttttttttttttttttttttttttttttttttttttttttttttttttttttttttttttttttttttttttttttttttttttttttttttttttttttttttttttttttttttttttttttttttttttttttttttttttttttttttttttttttttttttttttttttttttttttttttttttttttttttttttttttttttttttttttttttttttttttttttttttttttttttttttttttttttttttttttttttttttttttttttttttttttttttttttttttttttttttttttttttttttttttttttttttttttttttttttttttttttttttttttttttttttttttttttttttttttttttttttttttttttttttttttttttttttttttttttttttttttttttttttttttttttttttttttttttttttttttttttttttttttttttttttttttttttttttttttttttttttttttttttttttttttttttttttttttttttttttttttttttttttttttttttttttttttttttttttttttttttttttttttttttttttttttttttttttttttttttttttttttttttttttttttttttttttttttttttttttttttttttttttttttttttttttttttttttttttttttttttttttttttttttttttttttttttttttttttttttttttttttttttttttttttttttttttttttttttttttttttttttttttttttttttttttttttttttttttttttttttttttttttttttttttttttttttttttttttttttttttttttttttttttttttttttttttttttttttttttttttttttttttttttttttttttttttttttttttttttttttttttttttttttttttttttttttttttttttttttttttttttttttttttttttttttttttttttttttttttttttttttttttttttttttttttttttttttttttttttttttttttttttttttttttttttttttttttttttttttttttttttttttttttttttttttttttttttttttttttttttttttttttttttttttttttttttttttttttttttttttttttttttttttttttttttttttttttttttttttttttttttttttttttttttttttttttttttttttttttttttttttttttttttttttttttttttttttttttttttttttttttttttttttttttttttttttttttttttttttttttttttttttttttttttttttttttttttttttttttttttttttttttttttttttttttttttttttttttttttttttttttttttttttttttttttttttttttttttttttttttttttttttttttttttttttttttttttttttttttttttttttttttttttttttttttttttttttttttttttttttttttttttttttttttttttttttttttttttttttttttttttttttttttttttttttttttttttttttttttttttttttttttttttttttttttttttttttttttttttttttttttttttttttttttttttttttttttttttttttttttttttttttttttttttttttttttttttttttttttttttttttttttttttttttttttttttttttttttttttttttttttttttttttttttttttttttttttttttttttttttttttttttttttttttttttttttttttttttttttttttttttttttttttttttttttttttttttttttttttttttttttttttttttttttttttttttttttttttttttttttttttttttttttttttttttttttttttttttttttttttttttttttttttttttttttttttttttttttttttttttttttttttttttttttttttttttttttttttttttttttttttttttttttttttttttttttttttttttttttttttttttttttttttttttttttttttttttttttttttttttttttttttttttttttttttttttttttttttttttttttttttttttttttttttttttttttttttttttttttttttttttttttttttttttttttttttttttttttttttttttttttttttttttttttttttttttttttttttttttttttttttttttttttttttttttttttttttttttttttttttttttttttttttttttttttttttttttttttttttttttttttttttttttttttttttttttttttttttttttttttttttttttttttttttttttttttttttttttttttttttttttttttttttttttttttttttttttttttttttttttttttttttttttttttttttttttttttttttttttttttttttttttttttttttttttttttttttttttttttttttttttttttttttttttttttttttttttttttttttttttttttttttttttttttttttttttttttttttttttttttttttttttttttttttttttttttttttttttttttttttttttttttttttttttttttttttttttttttttttttttttttttttttttttttttttttttttttttttttttttttttttttttttttttttttttttttttttttttttttttttttttttttttttttttttttttttttttttttttttttttttttttttttttttttttttttttttttttttttttttttttttttttttttttttttttttttttttttttttttttttttttttttttttttttttttttttttttttttttttttttttttttttttttttttttttttttttttttttttttttttttttttttttttttttttttttttttttttttttttttttttttttttttttttttttttttttttttttttttttttttttttttttttttttttttttttttttttttttttttttttttttttttttttttttttttttttttttttttttttttttttttttttttttttttttttttttttttttttttttttttttttttttttttttttttttttttttttttttttttttttttttttttttttttttttttttttttttttttttttttttttttttttttttttttttttttttttttttttttttttttttttttttttttttttttttttttttttttttttttttttttttttttttttttttttttttttttttttttttttttttttttttttttttttttttttttttttttttttttttttttttttttttttttttttttttttttttttttttttttttttttttttttttttttttttttttttttttttttttttttttttttttttttttttttttttttttttttttttttttttttttttttttttttttttttttttttttttttttttttttttttttttttttttttttttttttttttttttttttttttttttttttttttttttttttttttttttttttttttttttttttttttttttttttttttttttttttttttttttttttttttttttttttttttttttttttttttttttttttttttttttttttttttttttttttttttttttttttttttttttttttttttttttttttttttttttttttttttttttttttt

SEQ ID NO: 33 - DNA, 5000 bp, Artificial Sequence; identical to SEQ ID NO: 30
  source: /note="Description of Artificial Sequence: Synthetic polynucleotide"
  misc_feature (1)..(5000): /note="This sequence may encompass 100-5000 nucleotides"
  source: /note="See specification as filed for detailed description of substitutions and preferred embodiments"

SEQ ID NO: 34 - DNA, 400 bp, Artificial Sequence
  source: /note="Description of Artificial Sequence: Synthetic polynucleotide"
  misc_feature (1)..(400): /note="This sequence may encompass 100-400 nucleotides"
  source: /note="See specification as filed for detailed description of substitutions and preferred embodiments"
aaaaaaaaaaaaaaaaaaaaaaaaaaaaaaaaaaaaaaaaaaaaaaaaaaaaaaaaaaaaaaaaaaaaaaaaaaaaaaaaaaaaaaaaaaaaaaaaaaaaaaaaaaaaaaaaaaaaaaaaaaaaaaaaaaaaaaaaaaaaaaaaaaaaaaaaaaaaaaaaaaaaaaaaaaaaaaaaaaaaaaaaaaaaaaaaaaaaaaaaaaaaaaaaaaaaaaaaaaaaaaaaaaaaaaaaaaaaaaaaaaaaaaaaaaaaaaaaaaaaaaaaaaaaaaaaaaaaaaaaaaaaaaaaaaaaaaaaaaaaaaaaaaaaaaaaaaaaaaaaaaaaaaaaaaaaaaaaaaaaaaaaaaaaaaaaaaaaaaaaaaaaaaaaaaaaaaaaaaaaaaaaaaaaaaaaaaaaaaaa

SEQ ID NO: 35 - DNA, 2000 bp, Artificial Sequence
  source: /note="Description of Artificial Sequence: Synthetic polynucleotide"
  misc_feature (1)..(2000): /note="This sequence may encompass 50-2000 nucleotides"
  source: /note="See specification as filed for detailed description of substitutions and preferred embodiments"
aaaaaaaaaaaaaaaaaaaaaaaaaaaaaaaaaaaaaaaaaaaaaaaaaaaaaaaaaaaaaaaaaaaaaaaaaaaaaaaaaaaaaaaaaaaaaaaaaaaaaaaaaaaaaaaaaaaaaaaaaaaaaaaaaaaaaaaaaaaaaaaaaaaaaaaaaaaaaaaaaaaaaaaaaaaaaaaaaaaaaaaaaaaaaaaaaaaaaaaaaaaaaaaaaaaaaaaaaaaaaaaaaaaaaaaaaaaaaaaaaaaaaaaaaaaaaaaaaaaaaaaaaaaaaaaaaaaaaaaaaaaaaaaaaaaaaaaaaaaaaaaaaaaaaaaaaaaaaaaaaaaaaaaaaaaaaaaaaaaaaaaaaaaaaaaaaaaaaaaaaaaaaaaaaaaaaaaaaaaaaaaaaaaaaaaaaaaaaaaaaaaaaaaaaaaaaaaaaaaaaaaaaaaaaaaaaaaaaaaaaaaaaaaaaaaaaaaaaaaaaaaaaaaaaaaaaaaaaaaaaaaaaaaaaaaaaaaaaaaaaaaaaaaaaaaaaaaaaaaaaaaaaaaaaaaaaaaaaaaaaaaaaaaaaaaaaaaaaaaaaaaaaaaaaaaaaaaaaaaaaaaaaaaaaaaaaaaaaaaaaaaaaaaaaaaaaaaaaaaaaaaaaaaaaaaaaaaaaaaaaaaaaaaaaaaaaaaaaaaaaaaaaaaaaaaaaaaaaaaaaaaaaaaaaaaaaaaaaaaaaaaaaaaaaaaaaaaaaaaaaaaaaaaaaaaaaaaaaaaaaaaaaaaaaaaaaaaaaaaaaaaaaaaaaaaaaaaaaaaaaaaaaaaaaaaaaaaaaaaaaaaaaaaaaaaaaaaaaaaaaaaaaaaaaaaaaaaaaaaaaaaaaaaaaaaaaaaaaaaaaaaaaaaaaaaaaaaaaaaaaaaaaaaaaaaaaaaaaaaaaaaaaaaaaaaaaaaaaaaaaaaaaaaaaaaaaaaaaaaaaaaaaaaaaaaaaaaaaaaaaaaaaaaaaaaaaaaaaaaaaaaaaaaaaaaaaaaaaaaaaaaaaaaaaaaaaaaaaaaaaaaaaaaaaaaaaaaaaaaaaaaaaaaaaaaaaaaaaaaaaaaaaaaaaaaaaaaaaaaaaaaaaaaaaaaaaaaaaaaaaaaaaaaaaaaaaaaaaaaaaaaaaaaaaaaaaaaaaaaaaaaaaaaaaaaaaaaaaaaaaaaaaaaaaaaaaaaaaaaaaaaaaaaaaaaaaaaaaaaaaaaaaaaaaaaaaaaaaaaaaaaaaaaaaaaaaaaaaaaaaaaaaaaaaaaaaaaaaaaaaaaaaaaaaaaaaaaaaaaaaaaaaaaaaaaaaaaaaaaaaaaaaaaaaaaaaaaaaaaaaaaaaaaaaaaaaaaaaaaaaaaaaaaaaaaaaaaaaaaaaaaaaaaaaaaaaaaaaaaaaaaaaaaaaaaaaaaaaaaaaaaaaaaaaaaaaaaaaaaaaaaaaaaaaaaaaaaaaaaaaaaaaaaaaaaaaaaaaaaaaaaaaaaaaaaaaaaaaaaaaaaaaaaaaaaaaaaaaaaaaaaaaaaaaaaaaaaaaaaaaaaaaaaaaaaaaaaaaaaaaaaaaaaaaaaaaaaaaaaaaaaaaaaaaaaaaaaaaaaaaaaaaaaaaaaaaaaaaaaaaaaaaaaaaaaaaaaaaaaaaaaaaaaaaaaaaaaaaaaaaaaaaaaaaaaaaaaaaaaaaaaaaaaaaaaaaaaaaaaaaaaaaaaaaaaaaaaaaaaaaaaaaaaaaaaaaaaaaaaaaaaaaaaaaaaaaaaaaaaaaaaaaaaaaaaaaaaaaaaaaaaaaaaaaaaaaaaaaaaaaaaaaaaaaaaaaaaaaaaaaaaaaaaaaaaaaaaaaaaaaaaaaaaaaaaaaaaaaaaaaaaaaaaaaaaaaaaaaaaaaaaaaaaaaaaaaaaaaaaaaaaaaaaaaaaaaaaaaaaaaaaaaaaaaaaaaaaaaaaaaaaaaaaaaaaaaaaaaaaaaaaaaaaaaaaaaaaaaaaaaaaaaaaaaaaaaaaaaaaaaaaaaaaaaaaaaaaaaaaa

SEQ ID NO: 36 - protein, 230 aa, Artificial Sequence; identical to SEQ ID NO: 3
  source: /note="Description of Artificial Sequence: Synthetic polypeptide"

SEQ ID NO: 37 - DNA, 690 bp, Artificial Sequence; identical to SEQ ID NO: 14
  source: /note="Description of Artificial Sequence: Synthetic polynucleotide"

SEQ ID NO: 38 - protein, 40 aa, Artificial Sequence
  source: /note="Description of Artificial Sequence: Synthetic polypeptide"
  MISC_FEATURE (1)..(40): /note="This sequence may encompass 1-10 'Gly Gly Gly Ser' repeating units"
  source: /note="See specification as filed for detailed description of substitutions and preferred embodiments"
GGGSGGGSGGGSGGGSGGGSGGGSGGGSGGGSGGGSGGGS

SEQ ID NO: 39 - protein, 246 aa, Artificial Sequence
  source: /note="Description of Artificial Sequence: Synthetic polypeptide"
QVQLVESGGGLVQPGRSLRLSCAASGFTFSNYAMSWVRQAPGKGLGWVSGISRSGENTYYADSVKGRFTISRDNSKNTLYLQMNSLRDEDTAVYYCARSPAHYYGGMDVWGQGTTVTVSSASGGGGSGGRASGGGGSDIVLTQSPGTLSLSPGERATLSCRASQSISSSFLAWYQQKPGQAPRLLIYGASRRATGIPDRFSGSGSGTDFTLTISRLEPEDSAVYYCQQYHSSPSWTFGQGTKLEIK

SEQ ID NO: 40 - protein, 244 aa, Artificial Sequence
  source: /note="Description of Artificial Sequence: Synthetic polypeptide"
QVQLVESGGGLVQPGRSLRLSCAASGFTFDDYAMHWVRQAPGKGLEWVSGISWNSGSIGYADSVKGRFTISRDNAKNSLYLQMNSLRAEDTALYYCSVHSFLAYWGQGTLVTVSSASGGGGSGGRASGGGGSDIVMTQTPLSLPVTPGEPASISCRSSQSLLHSNGYNYLDWYLQKPGQSPQLLIYLGSNRASGVPDRFSGSGSGTDFTLKISRVEAEDVGVYYCMQALQTPYTFGQGTKVEIK

SEQ ID NO: 41 - protein, 243 aa, Artificial Sequence
  source: /note="Description of Artificial Sequence: Synthetic polypeptide"
EVQLLESGGGLVQPGGSLRLSCAVSGFALSNHGMSWVRRAPGKGLEWVSGIVYSGSTYYAASVKGRFTISRDNSRNTLYLQMNSLRPEDTAIYYCSAHGGESDVWGQGTTVTVSSASGGGGSGGRASGGGGSDIVMTQTPLSLSVTPGQPASISCKSSQSLLRNDGKTPLYWYLQKAGQPPQLLIYEVSNRFSGVPDRFSGSGSGTDFTLKISRVEAEDVGAYYCMQNIQFPSFGGGTKLEIK

SEQ ID NO: 42 - protein, 249 aa, Artificial Sequence
  source: /note="Description of Artificial Sequence: Synthetic polypeptide"
QVQLVQSGAEVRKTGASVKVSCKASGYIFDNFGINWVRQAPGQGLEWMGWINPKNNNTNYAQKFQGRVTITADESTNTAYMEVSSLRSEDTAVYYCARGPYYYQSYMDVWGQGTMVTVSSASGGGGSGGRASGGGGSDIVMTQTPLSLPVTPGEPASISCRSSQSLLHSNGYNYLNWYLQKPGQSPQLLIYLGSKRASGVPDRFSGSGSGTDFTLHITRVGAEDVGVYYCMQALQTPYTFGQGTKLEIK

SEQ ID NO: 43 - protein, 246 aa, Artificial Sequence
  source: /note="Description of Artificial Sequence: Synthetic polypeptide"
QVQLQESGGGLVQPGGSLRLSCAASGFTFSSDAMTWVRQAPGKGLEWVSVISGSGGTTYYADSVKGRFTISRDNSKNTLYLQMNSLRAEDTAVYYCAKLDSSGYYYARGPRYWGQGTLVTVSSASGGGGSGGRASGGGGSDIQLTQSPSSLSASVGDRVTITCRASQSISSYLNWYQQKPGKAPKLLIYGASTLASGVPARFSGSGSGTHFTLTINSLQSEDSATYYCQQSYKRASFGQGTKVEIK

SEQ ID NO: 44 - protein, 247 aa, Artificial Sequence
  source: /note="Description of Artificial Sequence: Synthetic polypeptide"
QVQLVQSGAEVKKPGASVKVSCKASGYTFSNYGITWVRQAPGQGLEWMGWISAYNGNTNYAQKFQGRVTMTRNTSISTAYMELSSLRSEDTAVYYCARGPYYYYMDVWGKGTMVTVSSASGGGGSGGRASGGGGSEIVMTQSPLSLPVTPGEPASISCRSSQSLLYSNGYNYVDWYLQKPGQSPQLLIYLGSNRASGVPDRFSGSGSGTDFKLQISRVEAEDVGIYYCMQGRQFPYSFGQGTKVEIK

SEQ ID NO: 45 - protein, 238 aa, Artificial Sequence
  source: /note="Description of Artificial Sequence: Synthetic polypeptide"
EVQLLETGGGLVQPGGSLRLSCAVSGFALSNHGMSWVRRAPGKGLEWVSGIVYSGSTYYAASVKGRFTISRDNSRNTLYLQMNSLRPEDTAIYYCSAHGGESDVWGQGTTVTVSSASGGGGSGGRASGGGGSEIVLTQSPATLSVSPGESATLSCRASQSVSSNLAWYQQKPGQAPRLLIYGASTRASGIPDRFSGSGSGTDFTLTISSLQAEDVAVYYCQQYGSSLTFGGGTKVEIK

SEQ ID NO: 46 - protein, 239 aa, Artificial Sequence
  source: /note="Description of Artificial Sequence: Synthetic polypeptide"
EVQLVETGGGLVQPGGSLRLSCAVSGFALSNHGMSWVRRAPGKGLEWVSGIVYSGSTYYAASVKGRFTISRDNSRNTLYLQMNSLRPEDTAIYYCSAHGGESDVWGQGTTVTVSSASGGGGSGGRASGGGGSEIVMTQSPATLSVSPGERATLSCRASQSVSSKLAWYQQKPGQAPRLLMYGASIRATGIPDRFSGSGSGTEFTLTISSLEPEDFAVYYCQQYGSSSWTFGQGTKVEIK

SEQ ID NO: 47 - protein, 241 aa, Artificial Sequence
  source: /note="Description of Artificial Sequence: Synthetic polypeptide"
EVQLVETGGGVVQPGGSLRLSCAVSGFALSNHGMSWVRRAPGKGLEWVSGIVYSGSTYYAASVKGRFTISRDNSRNTLYLQMNSLRPEDTAIYYCSAHGGESDVWGQGTTVTVSSASGGGGSGGRASGGGGSEIVLTQSPGTLSLSPGERATLSCRASQSVGSTNLAWYQQKPGQAPRLLIYDASNRATGIPDRFSGGGSGTDFTLTISRLEPEDFAVYYCQQYGSSPPWTFGQGTKVEIK

SEQ ID NO: 48 - protein, 239 aa, Artificial Sequence
  source: /note="Description of Artificial Sequence: Synthetic polypeptide"
QVQLVESGGGLVKPGGSLRLSCAASGFTFSDYYMSWIRQAPGKGLEWVSYISSSGSTIYYADSVKGRFTISRDNAKNSLYLQMNSLRAEDTAVYYCARESGDGMDVWGQGTTVTVSSASGGGGSGGRASGGGGSDIQMTQSPSSLSASVGDRVTITCRASQSISSYLNWYQQKPGKAPKLLIYAASSLQSGVPSRFSGSGSGTDFTLTISSLQPEDFATYYCQQSYTLAFGQGTKVDIK

SEQ ID NO: 49 - protein, 239 aa, Artificial Sequence
  source: /note="Description of Artificial Sequence: Synthetic polypeptide"
EVQLVESGGGLVQPGGSLRLSCAVSGFALSNHGMSWVRRAPGKGLEWVSGIVYSGSTYYAASVKGRFTISRDNSRNTLYLQMNSLRPEDTAIYYCSAHGGESDVWGQGTTVTVSSASGGGGSGGRASGGGGSDIQLTQSPSSLSASVGDRVTITCRASQSISSYLNWYQQKPGKAPKLLIYAASSLQSGVPSRFSGSGSGTDFTLTISSLQPEDFATYYCQQSYSTPYTFGQGTKVEIK

SEQ ID NO: 50 - protein, 246 aa, Artificial Sequence
  source: /note="Description of Artificial Sequence: Synthetic polypeptide"
QVQLVQSGGGLVKPGGSLRLSCAASGFTFSDYYMSWIRQAPGKGLEWVSYISSSGNTIYYADSVKGRFTISRDNAKNSLYLQMNSLRAEDTAVYYCARSTMVREDYWGQGTLVTVSSASGGGGSGGRASGGGGSDIVLTQSPLSLPVTLGQPASISCKSSESLVHNSGKTYLNWFHQRPGQSPRRLIYEVSNRDSGVPDRFTGSGSGTDFTLKISRVEAEDVGVYYCMQGTHWPGTFGQGTKLEIK

SEQ ID NO: 51 - protein, 239 aa, Artificial Sequence
  source: /note="Description of Artificial Sequence: Synthetic polypeptide"
QVQLVESGGGLVQPGGSLRLSCAVSGFALSNHGMSWVRRAPGKGLEWVSGIVYSGSTYYAASVKGRFTISRDNSRNTLYLQMNSLRPEDTAIYYCSAHGGESDVWGQGTTVTVSSASGGGGSGGRASGGGGSDIRLTQSPSPLSASVGDRVTITCQASEDINKFLNWYHQTPGKAPKLLIYDASTLQTGVPSRFSGSGSGTDFTLTINSLQPEDIGTYYCQQYESLPLTFGGGTKVEIK

SEQ ID NO: 52 - protein, 240 aa, Artificial Sequence
  source: /note="Description of Artificial Sequence: Synthetic polypeptide"
EVQLVETGGGLVQPGGSLRLSCAVSGFALSNHGMSWVRRAPGKGLEWVSGIVYSGSTYYAASVKGRFTISRDNSRNTLYLQMNSLRPEDTAIYYCSAHGGESDVWGQGTTVTVSSASGGGGSGGRASGGGGSETTLTQSPATLSVSPGERATLSCRASQSVGSNLAWYQQKPGQGPRLLIYGASTRATGIPARFSGSGSGTEFTLTISSLQPEDFAVYYCQQYNDWLPVTFGQGTKVEIK

SEQ ID NO: 53 - protein, 241 aa, Artificial Sequence
  source: /note="Description of Artificial Sequence: Synthetic polypeptide"
EVQLVESGGGLVQPGGSLRLSCAVSGFALSNHGMSWVRRAPGKGLEWVSGIVYSGSTYYAASVKGRFTISRDNSRNTLYLQMNSLRPEDTAIYYCSAHGGESDVWGQGTTVTVSSASGGGGSGGRASGGGGSEIVLTQSPGTLSLSPGERATLSCRASQSIGSSSLAWYQQKPGQAPRLLMYGASSRASGIPDRFSGSGSGTDFTLTISRLEPEDFAVYYCQQYAGSPPFTFGQGTKVEIK

SEQ ID NO: 54 - DNA, 738 bp, Artificial Sequence
  source: /note="Description of Artificial Sequence: Synthetic polynucleotide"
caagtgcaactcgtggaatctggtggaggactcgtgcaacccggaagatcgcttagactgtcgtgtgccgccagcgggttcactttctcgaactacgcgatgtcctgggtccgccaggcacccggaaagggactcggttgggtgtccggcatttcccggtccggcgaaaatacctactacgccgactccgtgaagggccgcttcaccatctcaagggacaacagcaaaaacaccctgtacttgcaaatgaactccctgcgggatgaagatacagccgtgtactattgcgcccggtcgcctgcccattactacggcggaatggacgtctggggacagggaaccactgtgactgtcagcagcgcgtcgggtggcggcggctcagggggtcgggcctccggggggggagggtccgacatcgtgctgacccagtccccgggaaccctgagcctgagcccgggagagcgcgcgaccctgtcatgccgggcatcccagagcattagctcctcctttctcgcctggtatcagcagaagcccggacaggccccgaggctgctgatctacggcgctagcagaagggctaccggaatcccagaccggttctccggctccggttccgggaccgatttcacccttactatctcgcgcctggaacctgaggactccgccgtctactactgccagcagtaccactcatccccgtcgtggacgttcggacagggcaccaagctggagattaag

SEQ ID NO: 55 - DNA, 732 bp, Artificial Sequence
  source: /note="Description of Artificial Sequence: Synthetic polynucleotide"
caagtgcaactcgtcgaatccggtggaggtctggtccaacctggtagaagcctgagactgtcgtgtgcggccagcggattcacctttgatgactatgctatgcactgggtgcggcaggccccaggaaagggcctggaatgggtgtcgggaattagctggaactccgggtccattggctacgccgactccgtgaagggccgcttcaccatctcccgcgacaacgcaaagaactccctgtacttgcaaatgaactcgctcagggctgaggataccgcgctgtactactgctccgtgcattccttcctggcctactggggacagggaactctggtcaccgtgtcgagcgcctccggcggcgggggctcgggtggacgggcctcgggcggaggggggtccgacatcgtgatgacccagaccccgctgagcttgcccgtgactcccggagagcctgcatccatctcctgccggtcatcccagtcccttctccactccaacggatacaactacctcgactggtacctccagaagccgggacagagccctcagcttctgatctacctggggtcaaatagagcctcaggagtgccggatcggttcagcggatctggttcgggaactgatttcactctgaagatttcccgcgtggaagccgaggacgtgggcgtctactactgtatgcaggcgctgcagaccccctataccttcggccaagggacgaaagtggagatcaag

SEQ ID NO: 56 - DNA, 729 bp, Artificial Sequence
  source: /note="Description of Artificial Sequence: Synthetic polynucleotide"
gaagtgcaattgttggaatctggaggaggacttgtgcagcctggaggatcactgagactttcgtgtgcggtgtcaggcttcgccctgagcaaccacggcatgagctgggtgcggagagccccggggaagggtctggaatgggtgtccgggatcgtctactccggttcaacttactacgccgcaagcgtgaagggtcgcttcaccatttcccgcgataactcccggaacaccctgtacctccaaatgaactccctgcggcccgaggacaccgccatctactactgttccgcgcatggaggagagtccgatgtctggggacagggcactaccgtgaccgtgtcgagcgcctcggggggaggaggctccggcggtcgcgcctccggggggggtggcagcgacattgtgatgacgcagactccactctcgctgtccgtgaccccgggacagcccgcgtccatctcgtgcaagagctcccagagcctgctgaggaacgacggaaagactcctctgtattggtacctccagaaggctggacagcccccgcaactgctcatctacgaagtgtcaaatcgcttctccggggtgccggatcggttttccggctcgggatcgggcaccgacttcaccctgaaaatctccagggtcgaggccgaggacgtgggagcctactactgcatgcaaaacatccagttcccttccttcggcggcggcacaaagctggagattaag

SEQ ID NO: 57 - DNA, 747 bp, Artificial Sequence
  source: /note="Description of Artificial Sequence: Synthetic polynucleotide"
caagtccaactcgtccagtccggcgcagaagtcagaaaaaccggtgctagcgtgaaagtgtcctgcaaggcctccggctacattttcgataacttcggaatcaactgggtcagacaggccccgggccaggggctggaatggatgggatggatcaaccccaagaacaacaacaccaactacgcacagaagttccagggccgcgtgactatcaccgccgatgaatcgaccaataccgcctacatggaggtgtcctccctgcggtcggaggacactgccgtgtattactgcgcgaggggcccatactactaccaaagctacatggacgtctggggacagggaaccatggtgaccgtgtcatccgcctccggtggtggaggctccggggggcgggcttcaggaggcggaggaagcgatattgtgatgacccagactccgcttagcctgcccgtgactcctggagaaccggcctccatttcctgccggtcctcgcaatcactcctgcattccaacggttacaactacctgaattggtacctccagaagcctggccagtcgccccagttgctgatctatctgggctcgaagcgcgcctccggggtgcctgaccggtttagcggatctgggagcggcacggacttcactctccacatcacccgcgtgggagcggaggacgtgggagtgtactactgtatgcaggcgctgcagactccgtacacattcggacagggcaccaagctggagatcaag

SEQ ID NO: 58 - DNA, 738 bp, Artificial Sequence
  source: /note="Description of Artificial Sequence: Synthetic polynucleotide"
caagtgcaacttcaagaatcaggcggaggactcgtgcagcccggaggatcattgcggctctcgtgcgccgcctcgggcttcaccttctcgagcgacgccatgacctgggtccgccaggccccggggaaggggctggaatgggtgtctgtgatttccggctccgggggaactacgtactacgccgattccgtgaaaggtcgcttcactatctcccgggacaacagcaagaacaccctttatctgcaaatgaattccctccgcgccgaggacaccgccgtgtactactgcgccaagctggactcctcgggctactactatgcccggggtccgagatactggggacagggaaccctcgtgaccgtgtcctccgcgtccggcggaggagggtcgggagggcgggcctccggcggcggcggttcggacatccagctgacccagtccccatcctcactgagcgcaagcgtgggcgacagagtcaccattacatgcagggcgtcccagagcatcagctcctacctgaactggtaccaacagaagcctggaaaggctcctaagctgttgatctacggggcttcgaccctggcatccggggtgcccgcgaggtttagcggaagcggtagcggcactcacttcactctgaccattaacagcctccagtccgaggattcagccacttactactgtcagcagtcctacaagcgggccagcttcggacagggcactaaggtcgagatcaag

SEQ ID NO: 59 - DNA, 741 bp, Artificial Sequence
  source: /note="Description of Artificial Sequence: Synthetic polynucleotide"
caagtccaactggtccagagcggtgcagaagtgaagaagcccggagcgagcgtgaaagtgtcctgcaaggcttccgggtacaccttctccaactacggcatcacttgggtgcgccaggccccgggacagggcctggaatggatggggtggatttccgcgtacaacggcaatacgaactacgctcagaagttccagggtagagtgaccatgactaggaacacctccatttccaccgcctacatggaactgtcctccctgcggagcgaggacaccgccgtgtactattgcgcccggggaccatactactactacatggatgtctgggggaaggggactatggtcaccgtgtcatccgcctcgggaggcggcggatcaggaggacgcgcctctggtggtggaggatcggagatcgtgatgacccagagccctctctccttgcccgtgactcctggggagcccgcatccatttcatgccggagctcccagtcacttctctactccaacggctataactacgtggattggtacctccaaaagccgggccagagcccgcagctgctgatctacctgggctcgaacagggccagcggagtgcctgaccggttctccgggtcgggaagcgggaccgacttcaagctgcaaatctcgagagtggaggccgaggacgtgggaatctactactgtatgcagggccgccagtttccgtactcgttcggacagggcaccaaagtggaaatcaag

SEQ ID NO: 60 - DNA, 714 bp, Artificial Sequence
  source: /note="Description of Artificial Sequence: Synthetic polynucleotide"
gaagtgcaattgctcgaaactggaggaggtctggtgcaacctggaggatcacttcgcctgtcctgcgccgtgtcgggctttgccctgtccaaccatggaatgagctgggtccgccgcgcgccggggaagggcctcgaatgggtgtccggcatcgtctactccggctccacctactacgccgcgtccgtgaagggccggttcacgatttcacgggacaactcgcggaacaccctgtacctccaaatgaattcccttcggccggaggatactgccatctactactgctccgcccacggtggcgaatccgacgtctggggccagggaaccaccgtgaccgtgtccagcgcgtccgggggaggaggaagcgggggtagagcatcgggtggaggcggatcagagatcgtgctgacccagtcccccgccaccttgagcgtgtcaccaggagagtccgccaccctgtcatgccgcgccagccagtccgtgtcctccaacctggcttggtaccagcagaagccggggcaggcccctagactcctgatctatggggcgtcgacccgggcatctggaattcccgataggttcagcggatcgggctcgggcactgacttcactctgaccatctcctcgctgcaagccgaggacgtggctgtgtactactgtcagcagtacggaagctccctgactttcggtggcgggaccaaagtcgagattaag

SEQ ID NO: 61 - DNA, 717 bp, Artificial Sequence
  source: /note="Description of Artificial Sequence: Synthetic polynucleotide"
gaagtgcaattggtggaaactggaggaggacttgtgcaacctggaggatcattgagactgagctgcgcagtgtcgggattcgccctgagcaaccatggaatgtcctgggtcagaagggcccctggaaaaggcctcgaatgggtgtcagggatcgtgtactccggttccacttactacgccgcctccgtgaaggggcgcttcactatctcacgggataactcccgcaataccctgtacctccaaatgaacagcctgcggccggaggataccgccatctactactgttccgcccacggtggagagtctgacgtctggggccagggaactaccgtgaccgtgtcctccgcgtccggcggtggagggagcggcggccgcgccagcggcggcggaggctccgagatcgtgatgacccagagccccgctactctgtcggtgtcgcccggagaaagggcgaccctgtcctgccgggcgtcgcagtccgtgagcagcaagctggcttggtaccagcagaagccgggccaggcaccacgcctgcttatgtacggtgcctccattcgggccaccggaatcccggaccggttctcggggtcggggtccggtaccgagttcacactgaccatttcctcgctcgagcccgaggactttgccgtctattactgccagcagtacggctcctcctcatggacgttcggccaggggaccaaggtcgaaatcaag

SEQ ID NO: 62 - DNA, 723 bp, Artificial Sequence
  source: /note="Description of Artificial Sequence: Synthetic polynucleotide"
gaagtgcaattggtggagactggaggaggagtggtgcaacctggaggaagcctgagactgtcatgcgcggtgtcgggcttcgccctctccaaccacggaatgtcctgggtccgccgggcccctgggaaaggacttgaatgggtgtccggcatcgtgtactcgggttccacctactacgcggcctcagtgaagggccggtttactattagccgcgacaactccagaaacacactgtacctccaaatgaactcgctgcggccggaagataccgctatctactactgctccgcccatgggggagagtcggacgtctggggacagggcaccactgtcactgtgtccagcgcttccggcggtggtggaagcgggggacgggcctcaggaggcggtggcagcgagattgtgctgacccagtcccccgggaccctgagcctgtccccgggagaaagggccaccctctcctgtcgggcatcccagtccgtggggtctactaaccttgcatggtaccagcagaagcccggccaggcccctcgcctgctgatctacgacgcgtccaatagagccaccggcatcccggatcgcttcagcggaggcggatcgggcaccgacttcaccctcaccatttcaaggctggaaccggaggacttcgccgtgtactactgccagcagtatggttcgtccccaccctggacgttcggccaggggactaaggtcgagatcaag

SEQ ID NO: 63 - DNA, 717 bp, Artificial Sequence
  source: /note="Description of Artificial Sequence: Synthetic polynucleotide"
caagtgcaactcgtggaatctggtggaggactcgtgaaacctggaggatcattgagactgtcatgcgcggcctcgggattcacgttctccgattactacatgagctggattcgccaggctccggggaagggactggaatgggtgtcctacatttcctcatccggctccaccatctactacgcggactccgtgaaggggagattcaccattagccgcgataacgccaagaacagcctgtaccttcagatgaactccctgcgggctgaagatactgccgtctactactgcgcaagggagagcggagatgggatggacgtctggggacagggtaccactgtgaccgtgtcgtcggcctccggcggagggggttcgggtggaagggccagcggcggcggaggcagcgacatccagatgacccagtccccctcatcgctgtccgcctccgtgggcgaccgcgtcaccatcacatgccgggcctcacagtcgatctcctcctacctcaattggtatcagcagaagcccggaaaggcccctaagcttctgatctacgcagcgtcctccctgcaatccggggtcccatctcggttctccggctcgggcagcggtaccgacttcactctgaccatctcgagcctgcagccggaggacttcgccacttactactgtcagcaaagctacaccctcgcgtttggccagggcaccaaagtggacatcaag

SEQ ID NO: 64 - DNA, 717 bp, Artificial Sequence
  source: /note="Description of Artificial Sequence: Synthetic polynucleotide"
gaagtgcaattggtggaatcagggggaggacttgtgcagcctggaggatcgctgagactgtcatgtgccgtgtccggctttgccctgtccaaccacgggatgtcctgggtccgccgcgcgcctggaaagggcctcgaatgggtgtcgggtattgtgtacagcggtagcacctactatgccgcatccgtgaaggggagattcaccatcagccgggacaactccaggaacactctgtacctccaaatgaattcgctgaggccagaggacactgccatctactactgctccgcgcatggcggagagtccgacgtctggggacaggggaccaccgtgaccgtgtctagcgcgtccggcggaggcggcagcgggggtcgggcatcagggggcggcggatcggacatccagctcacccagtccccgagctcgctgtccgcctccgtgggagatcgggtcaccatcacgtgccgcgccagccagtcgatttcctcctacctgaactggtaccaacagaagcccggaaaagccccgaagcttctcatctacgccgcctcgagcctgcagtcaggagtgccctcacggttctccggctccggttccggtactgatttcaccctgaccatttcctccctgcaaccggaggacttcgctacttactactgccagcagtcgtactccaccccctacactttcggacaaggcaccaaggtcgaaatcaag

SEQ ID NO: 65 - DNA, 738 bp, Artificial Sequence
  source: /note="Description of Artificial Sequence: Synthetic polynucleotide"
caagtgcaactggtgcaaagcggaggaggattggtcaaacccggaggaagcctgagactgtcatgcgcggcctctggattcaccttctccgattactacatgtcatggatcagacaggccccggggaagggcctcgaatgggtgtcctacatctcgtcctccgggaacaccatctactacgccgacagcgtgaagggccgctttaccatttcccgcgacaacgcaaagaactcgctgtaccttcagatgaattccctgcgggctgaagataccgcggtgtactattgcgcccggtccactatggtccgggaggactactggggacagggcacactcgtgaccgtgtccagcgcgagcgggggtggaggcagcggtggacgcgcctccggcggcggcggttcagacatcgtgctgactcagtcgcccctgtcgctgccggtcaccctgggccaaccggcctcaattagctgcaagtcctcggagagcctggtgcacaactcaggaaagacttacctgaactggttccatcagcggcctggacagtccccacggaggctcatctatgaagtgtccaacagggattcgggggtgcccgaccgcttcactggctccgggtccggcaccgacttcaccttgaaaatctccagagtggaagccgaggacgtgggcgtgtactactgtatgcagggtacccactggcctggaacctttggacaaggaactaagctcgagattaag

SEQ ID NO: 66 - DNA, 717 bp, Artificial Sequence
  source: /note="Description of Artificial Sequence: Synthetic polynucleotide"
caagtgcaactcgtggaatctggtggaggactcgtgcaacccggtggaagccttaggctgtcgtgcgccgtcagcgggtttgctctgagcaaccatggaatgtcctgggtccgccgggcaccgggaaaagggctggaatgggtgtccggcatcgtgtacagcgggtcaacctattacgccgcgtccgtgaagggcagattcactatctcaagagacaacagccggaacaccctgtacttgcaaatgaattccctgcgccccgaggacaccgccatctactactgctccgcccacggaggagagtcggacgtgtggggccagggaacgactgtgactgtgtccagcgcatcaggagggggtggttcgggcggccgggcctcggggggaggaggttccgacattcggctgacccagtccccgtccccactgtcggcctccgtcggcgaccgcgtgaccatcacttgtcaggcgtccgaggacattaacaagttcctgaactggtaccaccagacccctggaaaggcccccaagctgctgatctacgatgcctcgacccttcaaactggagtgcctagccggttctccgggtccggctccggcactgatttcactctgaccatcaactcattgcagccggaagatatcgggacctactattgccagcagtacgaatccctcccgctcacattcggcgggggaaccaaggtcgagattaag

SEQ ID NO: 67 - DNA, 720 bp, Artificial Sequence
  source: /note="Description of Artificial Sequence: Synthetic polynucleotide"
gaagtgcaattggtggaaactggaggaggacttgtgcaacctggaggatcattgcggctctcatgcgctgtctccggcttcgccctgtcaaatcacgggatgtcgtgggtcagacgggccccgggaaagggtctggaatgggtgtcggggattgtgtacagcggctccacctactacgccgcttcggtcaagggccgcttcactatttcacgggacaacagccgcaacaccctctatctgcaaatgaactctctccgcccggaggataccgccatctactactgctccgcacacggcggcgaatccgacgtgtggggacagggaaccactgtcaccgtgtcgtccgcatccggtggcggaggatcgggtggccgggcctccgggggcggcggcagcgagactaccctgacccagtcccctgccactctgtccgtgagcccgggagagagagccacccttagctgccgggccagccagagcgtgggctccaacctggcctggtaccagcagaagccaggacagggtcccaggctgctgatctacggagcctccactcgcgcgaccggcatccccgcgaggttctccgggtcgggttccgggaccgagttcaccctgaccatctcctccctccaaccggaggacttcgcggtgtactactgtcagcagtacaacgattggctgcccgtgacatttggacaggggacgaaggtggaaatcaaa

SEQ ID NO: 68 - DNA, 723 bp, Artificial Sequence
  source: /note="Description of Artificial Sequence: Synthetic polynucleotide"
gaagtgcaattggtggaatctggtggaggacttgtgcaacctggaggatcactgagactgtcatgcgcggtgtccggttttgccctgagcaatcatgggatgtcgtgggtccggcgcgcccccggaaagggtctggaatgggtgtcgggtatcgtctactccgggagcacttactacgccgcgagcgtgaagggccgcttcaccatttcccgcgataactcccgcaacaccctgtacttgcaaatgaactcgctccggcctgaggacactgccatctactactgctccgcacacggaggagaatccgacgtgtggggccagggaactaccgtgaccgtcagcagcgcctccggcggcgggggctcaggcggacgggctagcggcggcggtggctccgagatcgtgctgacccagtcgcctggcactctctcgctgagccccggggaaagggcaaccctgtcctgtcgggccagccagtccattggatcatcctccctcgcctggtatcagcagaaaccgggacaggctccgcggctgcttatgtatggggccagctcaagagcctccggcattcccgaccggttctccgggtccggttccggcaccgatttcaccctgactatctcgaggctggagccagaggacttcgccgtgtactactgccagcagtacgcggggtccccgccgttcacgttcggacagggaaccaaggtcgagatcaag

SEQ ID NO: 69 - protein, 120 aa, Artificial Sequence
  source: /note="Description of Artificial Sequence: Synthetic polypeptide"
QVQLVESGGGLVQPGRSLRLSCAASGFTFSNYAMSWVRQAPGKGLGWVSGISRSGENTYYADSVKGRFTISRDNSKNTLYLQMNSLRDEDTAVYYCARSPAHYYGGMDVWGQGTTVTVSS

SEQ ID NO: 70 - protein, 115 aa, Artificial Sequence
  source: /note="Description of Artificial Sequence: Synthetic polypeptide"
QVQLVESGGGLVQPGRSLRLSCAASGFTFDDYAMHWVRQAPGKGLEWVSGISWNSGSIGYADSVKGRFTISRDNAKNSLYLQMNSLRAEDTALYYCSVHSFLAYWGQGTLVTVSS

SEQ ID NO: 71 - protein, 115 aa, Artificial Sequence
  source: /note="Description of Artificial Sequence: Synthetic polypeptide"
EVQLLESGGGLVQPGGSLRLSCAVSGFALSNHGMSWVRRAPGKGLEWVSGIVYSGSTYYAASVKGRFTISRDNSRNTLYLQMNSLRPEDTAIYYCSAHGGESDVWGQGTTVTVSS

SEQ ID NO: 72 - protein, 120 aa, Artificial Sequence
  source: /note="Description of Artificial Sequence: Synthetic polypeptide"
QVQLVQSGAEVRKTGASVKVSCKASGYIFDNFGINWVRQAPGQGLEWMGWINPKNNNTNYAQKFQGRVTITADESTNTAYMEVSSLRSEDTAVYYCARGPYYYQSYMDVWGQGTMVTVSS

SEQ ID NO: 73 - protein, 123 aa, Artificial Sequence
  source: /note="Description of Artificial Sequence: Synthetic polypeptide"
QVQLQESGGGLVQPGGSLRLSCAASGFTFSSDAMTWVRQAPGKGLEWVSVISGSGGTTYYADSVKGRFTISRDNSKNTLYLQMNSLRAEDTAVYYCAKLDSSGYYYARGPRYWGQGTLVTVSS

SEQ ID NO: 74 - protein, 118 aa, Artificial Sequence
  source: /note="Description of Artificial Sequence: Synthetic polypeptide"
QVQLVQSGAEVKKPGASVKVSCKASGYTFSNYGITWVRQAPGQGLEWMGWISAYNGNTNYAQKFQGRVTMTRNTSISTAYMELSSLRSEDTAVYYCARGPYYYYMDVWGKGTMVTVSS

SEQ ID NO: 75 - protein, 115 aa, Artificial Sequence
  source: /note="Description of Artificial Sequence: Synthetic polypeptide"
EVQLLETGGGLVQPGGSLRLSCAVSGFALSNHGMSWVRRAPGKGLEWVSGIVYSGSTYYAASVKGRFTISRDNSRNTLYLQMNSLRPEDTAIYYCSAHGGESDVWGQGTTVTVSS

SEQ ID NO: 76 - protein, 115 aa, Artificial Sequence
  source: /note="Description of Artificial Sequence: Synthetic polypeptide"
EVQLVETGGGLVQPGGSLRLSCAVSGFALSNHGMSWVRRAPGKGLEWVSGIVYSGSTYYAASVKGRFTISRDNSRNTLYLQMNSLRPEDTAIYYCSAHGGESDVWGQGTTVTVSS

SEQ ID NO: 77 - protein, 115 aa, Artificial Sequence
  source: /note="Description of Artificial Sequence: Synthetic polypeptide"
EVQLVETGGGVVQPGGSLRLSCAVSGFALSNHGMSWVRRAPGKGLEWVSGIVYSGSTYYAASVKGRFTISRDNSRNTLYLQMNSLRPEDTAIYYCSAHGGESDVWGQGTTVTVSS

SEQ ID NO: 78 - protein, 117 aa, Artificial Sequence
  source: /note="Description of Artificial Sequence: Synthetic polypeptide"
QVQLVESGGGLVKPGGSLRLSCAASGFTFSDYYMSWIRQAPGKGLEWVSYISSSGSTIYYADSVKGRFTISRDNAKNSLYLQMNSLRAEDTAVYYCARESGDGMDVWGQGTTVTVSS

SEQ ID NO: 79 - protein, 115 aa, Artificial Sequence
  source: /note="Description of Artificial Sequence: Synthetic polypeptide"
EVQLVESGGGLVQPGGSLRLSCAVSGFALSNHGMSWVRRAPGKGLEWVSGIVYSGSTYYAASVKGRFTISRDNSRNTLYLQMNSLRPEDTAIYYCSAHGGESDVWGQGTTVTVSS

SEQ ID NO: 80 - protein, 117 aa, Artificial Sequence
  source: /note="Description of Artificial Sequence: Synthetic polypeptide"
QVQLVQSGGGLVKPGGSLRLSCAASGFTFSDYYMSWIRQAPGKGLEWVSYISSSGNTIYYADSVKGRFTISRDNAKNSLYLQMNSLRAEDTAVYYCARSTMVREDYWGQGTLVTVSS

SEQ ID NO: 81 - protein, 115 aa, Artificial Sequence
  source: /note="Description of Artificial Sequence: Synthetic polypeptide"
QVQLVESGGGLVQPGGSLRLSCAVSGFALSNHGMSWVRRAPGKGLEWVSGIVYSGSTYYAASVKGRFTISRDNSRNTLYLQMNSLRPEDTAIYYCSAHGGESDVWGQGTTVTVSS

SEQ ID NO: 82 - protein, 115 aa, Artificial Sequence; identical to SEQ ID NO: 76
  source: /note="Description of Artificial Sequence: Synthetic polypeptide"

SEQ ID NO: 83 - protein, 115 aa, Artificial Sequence; identical to SEQ ID NO: 79
  source: /note="Description of Artificial Sequence: Synthetic polypeptide"

SEQ ID NO: 84 - protein, 109 aa, Artificial Sequence
  source: /note="Description of Artificial Sequence: Synthetic polypeptide"
DIVLTQSPGTLSLSPGERATLSCRASQSISSSFLAWYQQKPGQAPRLLIYGASRRATGIPDRFSGSGSGTDFTLTISRLEPEDSAVYYCQQYHSSPSWTFGQGTKLEIK

SEQ ID NO: 85 - protein, 112 aa, Artificial Sequence
  source: /note="Description of Artificial Sequence: Synthetic polypeptide"
DIVMTQTPLSLPVTPGEPASISCRSSQSLLHSNGYNYLDWYLQKPGQSPQLLIYLGSNRASGVPDRFSGSGSGTDFTLKISRVEAEDVGVYYCMQALQTPYTFGQGTKVEIK

SEQ ID NO: 86 - protein, 111 aa, Artificial Sequence
  source: /note="Description of Artificial Sequence: Synthetic polypeptide"
DIVMTQTPLSLSVTPGQPASISCKSSQSLLRNDGKTPLYWYLQKAGQPPQLLIYEVSNRFSGVPDRFSGSGSGTDFTLKISRVEAEDVGAYYCMQNIQFPSFGGGTKLEIK

SEQ ID NO: 87 - protein, 112 aa, Artificial Sequence
  source: /note="Description of Artificial Sequence: Synthetic polypeptide"
DIVMTQTPLSLPVTPGEPASISCRSSQSLLHSNGYNYLNWYLQKPGQSPQLLIYLGSKRASGVPDRFSGSGSGTDFTLHITRVGAEDVGVYYCMQALQTPYTFGQGTKLEIK

SEQ ID NO: 88 - protein, 106 aa, Artificial Sequence
  source: /note="Description of Artificial Sequence: Synthetic polypeptide"
DIQLTQSPSSLSASVGDRVTITCRASQSISSYLNWYQQKPGKAPKLLIYGASTLASGVPARFSGSGSGTHFTLTINSLQSEDSATYYCQQSYKRASFGQGTKVEIK

SEQ ID NO: 89 - protein, 112 aa, Artificial Sequence
  source: /note="Description of Artificial Sequence: Synthetic polypeptide"
EIVMTQSPLSLPVTPGEPASISCRSSQSLLYSNGYNYVDWYLQKPGQSPQLLIYLGSNRASGVPDRFSGSGSGTDFKLQISRVEAEDVGIYYCMQGRQFPYSFGQGTKVEIK

SEQ ID NO: 90 - protein, 106 aa, Artificial Sequence
  source: /note="Description of Artificial Sequence: Synthetic polypeptide"
EIVLTQSPATLSVSPGESATLSCRASQSVSSNLAWYQQKPGQAPRLLIYGASTRASGIPDRFSGSGSGTDFTLTISSLQAEDVAVYYCQQYGSSLTFGGGTKVEIK

SEQ ID NO: 91 - protein, 107 aa, Artificial Sequence
  source: /note="Description of Artificial Sequence: Synthetic polypeptide"
EIVMTQSPATLSVSPGERATLSCRASQSVSSKLAWYQQKPGQAPRLLMYGASIRATGIPDRFSGSGSGTEFTLTISSLEPEDFAVYYCQQYGSSSWTFGQGTKVEIK

SEQ ID NO: 92 - protein, 109 aa, Artificial Sequence
  source: /note="Description of Artificial Sequence: Synthetic polypeptide"
EIVLTQSPGTLSLSPGERATLSCRASQSVGSTNLAWYQQKPGQAPRLLIYDASNRATGIPDRFSGGGSGTDFTLTISRLEPEDFAVYYCQQYGSSPPWTFGQGTKVEIK

SEQ ID NO: 93 - protein, 105 aa, Artificial Sequence
  source: /note="Description of Artificial Sequence: Synthetic polypeptide"
DIQMTQSPSSLSASVGDRVTITCRASQSISSYLNWYQQKPGKAPKLLIYAASSLQSGVPSRFSGSGSGTDFTLTISSLQPEDFATYYCQQSYTLAFGQGTKVDIK

SEQ ID NO: 94 - protein, 107 aa, Artificial Sequence
  source: /note="Description of Artificial Sequence: Synthetic polypeptide"
DIQLTQSPSSLSASVGDRVTITCRASQSISSYLNWYQQKPGKAPKLLIYAASSLQSGVPSRFSGSGSGTDFTLTISSLQPEDFATYYCQQSYSTPYTFGQGTKVEIK

SEQ ID NO: 95 - protein, 112 aa, Artificial Sequence
  source: /note="Description of Artificial Sequence: Synthetic polypeptide"
DIVLTQSPLSLPVTLGQPASISCKSSESLVHNSGKTYLNWFHQRPGQSPRRLIYEVSNRDSGVPDRFTGSGSGTDFTLKISRVEAEDVGVYYCMQGTHWPGTFGQGTKLEIK

SEQ ID NO: 96 - protein, 107 aa, Artificial Sequence
  source: /note="Description of Artificial Sequence: Synthetic polypeptide"
DIRLTQSPSPLSASVGDRVTITCQASEDINKFLNWYHQTPGKAPKLLIYDASTLQTGVPSRFSGSGSGTDFTLTINSLQPEDIGTYYCQQYESLPLTFGGGTKVEIK

SEQ ID NO: 97 - protein, 108 aa, Artificial Sequence
  source: /note="Description of Artificial Sequence: Synthetic polypeptide"
ETTLTQSPATLSVSPGERATLSCRASQSVGSNLAWYQQKPGQGPRLLIYGASTRATGIPARFSGSGSGTEFTLTISSLQPEDFAVYYCQQYNDWLPVTFGQGTKVEIK

SEQ ID NO: 98 - protein, 109 aa, Artificial Sequence
  source: /note="Description of Artificial Sequence: Synthetic polypeptide"
EIVLTQSPGTLSLSPGERATLSCRASQSIGSSSLAWYQQKPGQAPRLLMYGASSRASGIPDRFSGSGSGTDFTLTISRLEPEDFAVYYCQQYAGSPPFTFGQGTKVEIK

SEQ ID NO: 99 - protein, 490 aa, Artificial Sequence
  source: /note="Description of Artificial Sequence: Synthetic polypeptide"
MALPVTALLLPLALLLHAARPQVQLVESGGGLVQPGRSLRLSCAASGFTFSNYAMSWVRQAPGKGLGWVSGISRSGENTYYADSVKGRFTISRDNSKNTLYLQMNSLRDEDTAVYYCARSPAHYYGGMDVWGQGTTVTVSSASGGGGSGGRASGGGGSDIVLTQSPGTLSLSPGERATLSCRASQSISSSFLAWYQQKPGQAPRLLIYGASRRATGIPDRFSGSGSGTDFTLTISRLEPEDSAVYYCQQYHSSPSWTFGQGTKLEIKTTTPAPRPPTPAPTIASQPLSLRPEACRPAAGGAVHTRGLDFACDIYIWAPLAGTCGVLLLSLVITLYCKRGRKKLLYIFKQPFMRPVQTTQEEDGCSCRFPEEEEGGCELRVKFSRSADAPAYKQGQNQLYNELNLGRREEYDVLDKRRGRDPEMGGKPRRKNPQEGLYNELQKDKMAEAYSEIGMKGERRRGKGHDGLYQGLSTATKDTYDALHMQALPPR

SEQ ID NO: 100 - protein, 488 aa, Artificial Sequence
  source: /note="Description of Artificial Sequence: Synthetic polypeptide"
MALPVTALLLPLALLLHAARPQVQLVESGGGLVQPGRSLRLSCAASGFTFDDYAMHWVRQAPGKGLEWVSGISWNSGSIGYADSVKGRFTISRDNAKNSLYLQMNSLRAEDTALYYCSVHSFLAYWGQGTLVTVSSASGGGGSGGRASGGGGSDIVMTQTPLSLPVTPGEPASISCRSSQSLLHSNGYNYLDWYLQKPGQSPQLLIYLGSNRASGVPDRFSGSGSGTDFTLKISRVEAEDVGVYYCMQALQTPYTFGQGTKVEIKTTTPAPRPPTPAPTIASQPLSLRPEACRPAAGGAVHTRGLDFACDIYIWAPLAGTCGVLLLSLVITLYCKRGRKKLLYIFKQPFMRPVQTTQEEDGCSCRFPEEEEGGCELRVKFSRSADAPAYKQGQNQLYNELNLGRREEYDVLDKRRGRDPEMGGKPRRKNPQEGLYNELQKDKMAEAYSEIGMKGERRRGKGHDGLYQGLSTATKDTYDALHMQALPPR

SEQ ID NO: 101 - protein, 487 aa, Artificial Sequence
  source: /note="Description of Artificial Sequence: Synthetic polypeptide"
MALPVTALLLPLALLLHAARPEVQLLESGGGLVQPGGSLRLSCAVSGFALSNHGMSWVRRAPGKGLEWVSGIVYSGSTYYAASVKGRFTISRDNSRNTLYLQMNSLRPEDTAIYYCSAHGGESDVWGQGTTVTVSSASGGGGSGGRASGGGGSDIVMTQTPLSLSVTPGQPASISCKSSQSLLRNDGKTPLYWYLQKAGQPPQLLIYEVSNRFSGVPDRFSGSGSGTDFTLKISRVEAEDVGAYYCMQNIQFPSFGGGTKLEIKTTTPAPRPPTPAPTIASQPLSLRPEACRPAAGGAVHTRGLDFACDIYIWAPLAGTCGVLLLSLVITLYCKRGRKKLLYIFKQPFMRPVQTTQEEDGCSCRFPEEEEGGCELRVKFSRSADAPAYKQGQNQLYNELNLGRREEYDVLDKRRGRDPEMGGKPRRKNPQEGLYNELQKDKMAEAYSEIGMKGERRRGKGHDGLYQGLSTATKDTYDALHMQALPPR

SEQ ID NO: 102 - protein, 493 aa, Artificial Sequence
  source: /note="Description of Artificial Sequence: Synthetic polypeptide"
MALPVTALLLPLALLLHAARPQVQLVQSGAEVRKTGASVKVSCKASGYIFDNFGINWVRQAPGQGLEWMGWINPKNNNTNYAQKFQGRVTITADESTNTAYMEVSSLRSEDTAVYYCARGPYYYQSYMDVWGQGTMVTVSSASGGGGSGGRASGGGGSDIVMTQTPLSLPVTPGEPASISCRSSQSLLHSNGYNYLNWYLQKPGQSPQLLIYLGSKRASGVPDRFSGSGSGTDFTLHITRVGAEDVGVYYCMQALQTPYTFGQGTKLEIKTTTPAPRPPTPAPTIASQPLSLRPEACRPAAGGAVHTRGLDFACDIYIWAPLAGTCGVLLLSLVITLYCKRGRKKLLYIFKQPFMRPVQTTQEEDGCSCRFPEEEEGGCELRVKFSRSADAPAYKQGQNQLYNELNLGRREEYDVLDKRRGRDPEMGGKPRRKNPQEGLYNELQKDKMAEAYSEIGMKGERRRGKGHDGLYQGLSTATKDTYDALHMQALPPR

SEQ ID NO: 103 - protein, 490 aa, Artificial Sequence
  source: /note="Description of Artificial Sequence: Synthetic polypeptide"
MALPVTALLLPLALLLHAARPQVQLQESGGGLVQPGGSLRLSCAASGFTFSSDAMTWVRQAPGKGLEWVSVISGSGGTTYYADSVKGRFTISRDNSKNTLYLQMNSLRAEDTAVYYCAKLDSSGYYYARGPRYWGQGTLVTVSSASGGGGSGGRASGGGGSDIQLTQSPSSLSASVGDRVTITCRASQSISSYLNWYQQKPGKAPKLLIYGASTLASGVPARFSGSGSGTHFTLTINSLQSEDSATYYCQQSYKRASFGQGTKVEIKTTTPAPRPPTPAPTIASQPLSLRPEACRPAAGGAVHTRGLDFACDIYIWAPLAGTCGVLLLSLVITLYCKRGRKKLLYIFKQPFMRPVQTTQEEDGCSCRFPEEEEGGCELRVKFSRSADAPAYKQGQNQLYNELNLGRREEYDVLDKRRGRDPEMGGKPRRKNPQEGLYNELQKDKMAEAYSEIGMKGERRRGKGHDGLYQGLSTATKDTYDALHMQALPPR

SEQ ID NO: 104 - protein, 491 aa, Artificial Sequence
  source: /note="Description of Artificial Sequence: Synthetic polypeptide"
MALPVTALLLPLALLLHAARPQVQLVQSGAEVKKPGASVKVSCKASGYTFSNYGITWVRQAPGQGLEWMGWISAYNGNTNYAQKFQGRVTMTRNTSISTAYMELSSLRSEDTAVYYCARGPYYYYMDVWGKGTMVTVSSASGGGGSGGRASGGGGSEIVMTQSPLSLPVTPGEPASISCRSSQSLLYSNGYNYVDWYLQKPGQSPQLLIYLGSNRASGVPDRFSGSGSGTDFKLQISRVEAEDVGIYYCMQGRQFPYSFGQGTKVEIKTTTPAPRPPTPAPTIASQPLSLRPEACRPAAGGAVHTRGLDFACDIYIWAPLAGTCGVLLLSLVITLYCKRGRKKLLYIFKQPFMRPVQTTQEEDGCSCRFPEEEEGGCELRVKFSRSADAPAYKQGQNQLYNELNLGRREEYDVLDKRRGRDPEMGGKPRRKNPQEGLYNELQKDKMAEAYSEIGMKGERRRGKGHDGLYQGLSTATKDTYDALHMQALPPR

SEQ ID NO: 105 - protein, 482 aa, Artificial Sequence
  source: /note="Description of Artificial Sequence: Synthetic polypeptide"
MALPVTALLLPLALLLHAARPEVQLLETGGGLVQPGGSLRLSCAVSGFALSNHGMSWVRRAPGKGLEWVSGIVYSGSTYYAASVKGRFTISRDNSRNTLYLQMNSLRPEDTAIYYCSAHGGESDVWGQGTTVTVSSASGGGGSGGRASGGGGSEIVLTQSPATLSVSPGESATLSCRASQSVSSNLAWYQQKPGQAPRLLIYGASTRASGIPDRFSGSGSGTDFTLTISSLQAEDVAVYYCQQYGSSLTFGGGTKVEIKTTTPAPRPPTPAPTIASQPLSLRPEACRPAAGGAVHTRGLDFACDIYIWAPLAGTCGVLLLSLVITLYCKRGRKKLLYIFKQPFMRPVQTTQEEDGCSCRFPEEEEGGCELRVKFSRSADAPAYKQGQNQLYNELNLGRREEYDVLDKRRGRDPEMGGKPRRKNPQEGLYNELQKDKMAEAYSEIGMKGERRRGKGHDGLYQGLSTATKDTYDALHMQALPPR

SEQ ID NO: 106 - protein, 483 aa, Artificial Sequence
  source: /note="Description of Artificial Sequence: Synthetic polypeptide"
MALPVTALLLPLALLLHAARPEVQLVETGGGLVQPGGSLRLSCAVSGFALSNHGMSWVRRAPGKGLEWVSGIVYSGSTYYAASVKGRFTISRDNSRNTLYLQMNSLRPEDTAIYYCSAHGGESDVWGQGTTVTVSSASGGGGSGGRASGGGGSEIVMTQSPATLSVSPGERATLSCRASQSVSSKLAWYQQKPGQAPRLLMYGASIRATGIPDRFSGSGSGTEFTLTISSLEPEDFAVYYCQQYGSSSWTFGQGTKVEIKTTTPAPRPPTPAPTIASQPLSLRPEACRPAAGGAVHTRGLDFACDIYIWAPLAGTCGVLLLSLVITLYCKRGRKKLLYIFKQPFMRPVQTTQEEDGCSCRFPEEEEGGCELRVKFSRSADAPAYKQGQNQLYNELNLGRREEYDVLDKRRGRDPEMGGKPRRKNPQEGLYNELQKDKMAEAYSEIGMKGERRRGKGHDGLYQGLSTATKDTYDALHMQALPPR

SEQ ID NO: 107 - protein, 485 aa, Artificial Sequence
  source: /note="Description of Artificial Sequence: Synthetic polypeptide"
MALPVTALLLPLALLLHAARPEVQLVETGGGVVQPGGSLRLSCAVSGFALSNHGMSWVRRAPGKGLEWVSGIVYSGSTYYAASVKGRFTISRDNSRNTLYLQMNSLRPEDTAIYYCSAHGGESDVWGQGTTVTVSSASGGGGSGGRASGGGGSEIVLTQSPGTLSLSPGERATLSCRASQSVGSTNLAWYQQKPGQAPRLLIYDASNRATGIPDRFSGGGSGTDFTLTISRLEPEDFAVYYCQQYGSSPPWTFGQGTKVEIKTTTPAPRPPTPAPTIASQPLSLRPEACRPAAGGAVHTRGLDFACDIYIWAPLAGTCGVLLLSLVITLYCKRGRKKLLYIFKQPFMRPVQTTQEEDGCSCRFPEEEEGGCELRVKFSRSADAPAYKQGQNQLYNELNLGRREEYDVLDKRRGRDPEMGGKPRRKNPQEGLYNELQKDKMAEAYSEIGMKGERRRGKGHDGLYQGLSTATKDTYDALHMQALPPR

SEQ ID NO: 108 - protein, 483 aa, Artificial Sequence
  source: /note="Description of Artificial Sequence: Synthetic polypeptide"
MALPVTALLLPLALLLHAARPQVQLVESGGGLVKPGGSLRLSCAASGFTFSDYYMSWIRQAPGKGLEWVSYISSSGSTIYYADSVKGRFTISRDNAKNSLYLQMNSLRAEDTAVYYCARESGDGMDVWGQGTTVTVSSASGGGGSGGRASGGGGSDIQMTQSPSSLSASVGDRVTITCRASQSISSYLNWYQQKPGKAPKLLIYAASSLQSGVPSRFSGSGSGTDFTLTISSLQPEDFATYYCQQSYTLAFGQGTKVDIKTTTPAPRPPTPAPTIASQPLSLRPEACRPAAGGAVHTRGLDFACDIYIWAPLAGTCGVLLLSLVITLYCKRGRKKLLYIFKQPFMRPVQTTQEEDGCSCRFPEEEEGGCELRVKFSRSADAPAYKQGQNQLYNELNLGRREEYDVLDKRRGRDPEMGGKPRRKNPQEGLYNELQKDKMAEAYSEIGMKGERRRGKGHDGLYQGLSTATKDTYDALHMQALPPR

SEQ ID NO: 109 - protein, 483 aa, Artificial Sequence
  source: /note="Description of Artificial Sequence: Synthetic polypeptide"
MALPVTALLLPLALLLHAARPEVQLVESGGGLVQPGGSLRLSCAVSGFALSNHGMSWVRRAPGKGLEWVSGIVYSGSTYYAASVKGRFTISRDNSRNTLYLQMNSLRPEDTAIYYCSAHGGESDVWGQGTTVTVSSASGGGGSGGRASGGGGSDIQLTQSPSSLSASVGDRVTITCRASQSISSYLNWYQQKPGKAPKLLIYAASSLQSGVPSRFSGSGSGTDFTLTISSLQPEDFATYYCQQSYSTPYTFGQGTKVEIKTTTPAPRPPTPAPTIASQPLSLRPEACRPAAGGAVHTRGLDFACDIYIWAPLAGTCGVLLLSLVITLYCKRGRKKLLYIFKQPFMRPVQTTQEEDGCSCRFPEEEEGGCELRVKFSRSADAPAYKQGQNQLYNELNLGRREEYDVLDKRRGRDPEMGGKPRRKNPQEGLYNELQKDKMAEAYSEIGMKGERRRGKGHDGLYQGLSTATKDTYDALHMQALPPR

SEQ ID NO: 110 - protein, 490 aa, Artificial Sequence
  source: /note="Description of Artificial Sequence: Synthetic polypeptide"
MALPVTALLLPLALLLHAARPQVQLVQSGGGLVKPGGSLRLSCAASGFTFSDYYMSWIRQAPGKGLEWVSYISSSGNTIYYADSVKGRFTISRDNAKNSLYLQMNSLRAEDTAVYYCARSTMVREDYWGQGTLVTVSSASGGGGSGGRASGGGGSDIVLTQSPLSLPVTLGQPASISCKSSESLVHNSGKTYLNWFHQRPGQSPRRLIYEVSNRDSGVPDRFTGSGSGTDFTLKISRVEAEDVGVYYCMQGTHWPGTFGQGTKLEIKTTTPAPRPPTPAPTIASQPLSLRPEACRPAAGGAVHTRGLDFACDIYIWAPLAGTCGVLLLSLVITLYCKRGRKKLLYIFKQPFMRPVQTTQEEDGCSCRFPEEEEGGCELRVKFSRSADAPAYKQGQNQLYNELNLGRREEYDVLDKRRGRDPEMGGKPRRKNPQEGLYNELQKDKMAEAYSEIGMKGERRRGKGHDGLYQGLSTATKDTYDALHMQALPPR

SEQ ID NO: 111 - protein, 483 aa, Artificial Sequence
  source: /note="Description of Artificial Sequence: Synthetic polypeptide"
MALPVTALLLPLALLLHAARPQVQLVESGGGLVQPGGSLRLSCAVSGFALSNHGMSWVRRAPGKGLEWVSGIVYSGSTYYAASVKGRFTISRDNSRNTLYLQMNSLRPEDTAIYYCSAHGGESDVWGQGTTVTVSSASGGGGSGGRASGGGGSDIRLTQSPSPLSASVGDRVTITCQASEDINKFLNWYHQTPGKAPKLLIYDASTLQTGVPSRFSGSGSGTDFTLTINSLQPEDIGTYYCQQYESLPLTFGGGTKVEIKTTTPAPRPPTPAPTIASQPLSLRPEACRPAAGGAVHTRGLDFACDIYIWAPLAGTCGVLLLSLVITLYCKRGRKKLLYIFKQPFMRPVQTTQEEDGCSCRFPEEEEGGCELRVKFSRSADAPAYKQGQNQLYNELNLGRREEYDVLDKRRGRDPEMGGKPRRKNPQEGLYNELQKDKMAEAYSEIGMKGERRRGKGHDGLYQGLSTATKDTYDALHMQALPPR

SEQ ID NO: 112 - protein, 484 aa, Artificial Sequence
  source: /note="Description of Artificial Sequence: Synthetic polypeptide"
MALPVTALLLPLALLLHAARPEVQLVETGGGLVQPGGSLRLSCAVSGFALSNHGMSWVRRAPGKGLEWVSGIVYSGSTYYAASVKGRFTISRDNSRNTLYLQMNSLRPEDTAIYYCSAHGGESDVWGQGTTVTVSSASGGGGSGGRASGGGGSETTLTQSPATLSVSPGERATLSCRASQSVGSNLAWYQQKPGQGPRLLIYGASTRATGIPARFSGSGSGTEFTLTISSLQPEDFAVYYCQQYNDWLPVTFGQGTKVEIKTTTPAPRPPTPAPTIASQPLSLRPEACRPAAGGAVHTRGLDFACDIYIWAPLAGTCGVLLLSLVITLYCKRGRKKLLYIFKQPFMRPVQTTQEEDGCSCRFPEEEEGGCELRVKFSRSADAPAYKQGQNQLYNELNLGRREEYDVLDKRRGRDPEMGGKPRRKNPQEGLYNELQKDKMAEAYSEIGMKGERRRGKGHDGLYQGLSTATKDTYDALHMQALPPR

SEQ ID NO: 113 - protein, 485 aa, Artificial Sequence
  source: /note="Description of Artificial Sequence: Synthetic polypeptide"
MALPVTALLLPLALLLHAARPEVQLVESGGGLVQPGGSLRLSCAVSGFALSNHGMSWVRRAPGKGLEWVSGIVYSGSTYYAASVKGRFTISRDNSRNTLYLQMNSLRPEDTAIYYCSAHGGESDVWGQGTTVTVSSASGGGGSGGRASGGGGSEIVLTQSPGTLSLSPGERATLSCRASQSIGSSSLAWYQQKPGQAPRLLMYGASSRASGIPDRFSGSGSGTDFTLTISRLEPEDFAVYYCQQYAGSPPFTFGQGTKVEIKTTTPAPRPPTPAPTIASQPLSLRPEACRPAAGGAVHTRGLDFACDIYIWAPLAGTCGVLLLSLVITLYCKRGRKKLLYIFKQPFMRPVQTTQEEDGCSCRFPEEEEGGCELRVKFSRSADAPAYKQGQNQLYNELNLGRREEYDVLDKRRGRDPEMGGKPRRKNPQEGLYNELQKDKMAEAYSEIGMKGERRRGKGHDGLYQGLSTATKDTYDALHMQALPPR

SEQ ID NO: 114 - DNA, 1470 bp, Artificial Sequence
  source: /note="Description of Artificial Sequence: Synthetic polynucleotide"
atggccctccctgtcaccgccctgctgcttccgctggctcttctgctccacgccgctcggccccaagtgcaactcgtggaatctggtggaggactcgtgcaacccggaagatcgcttagactgtcgtgtgccgccagcgggttcactttctcgaactacgcgatgtcctgggtccgccaggcacccggaaagggactcggttgggtgtccggcatttcccggtccggcgaaaatacctactacgccgactccgtgaagggccgcttcaccatctcaagggacaacagcaaaaacaccctgtacttgcaaatgaactccctgcgggatgaagatacagccgtgtactattgcgcccggtcgcctgcccattactacggcggaatggacgtctggggacagggaaccactgtgactgtcagcagcgcgtcgggtggcggcggctcagggggtcgggcctccggggggggagggtccgacatcgtgctgacccagtccccgggaaccctgagcctgagcccgggagagcgcgcgaccctgtcatgccgggcatcccagagcattagctcctcctttctcgcctggtatcagcagaagcccggacaggccccgaggctgctgatctacggcgctagcagaagggctaccggaatcccagaccggttctccggctccggttccgggaccgatttcacccttactatctcgcgcctggaacctgaggactccgccgtctactactgccagcagtaccactcatccccgtcgtggacgttcggacagggcaccaagctggagattaagaccactaccccagcaccgaggccacccaccccggctcctaccatcgcctcccagcctctgtccctgcgtccggaggcatgtagacccgcagctggtggggccgtgcatacccggggtcttgacttcgcctgcgatatctacatttgggcccctctggctggtacttgcggggtcctgctgctttcactcgtgatcactctttactgtaagcgcggtcggaagaagctgctgtacatctttaagcaacccttcatgaggcctgtgcagactactcaagaggaggacggctgttcatgccggttcccagaggaggaggaaggcggctgcgaactgcgcgtgaaattcagccgcagcgcagatgctccagcctacaagcaggggcagaaccagctctacaacgaactcaatcttggtcggagagaggagtacgacgtgctggacaagcggagaggacgggacccagaaatgggcgggaagccgcgcagaaagaatccccaagagggcctgtacaacgagctccaaaaggataagatggcagaagcctatagcgagattggtatgaaaggggaacgcagaagaggcaaaggccacgacggactgtaccagggactcagcaccgccaccaaggacacctatgacgctcttcacatgcaggccctgccgcctcgg

SEQ ID NO: 115 - DNA, 1464 bp, Artificial Sequence
  source: /note="Description of Artificial Sequence: Synthetic polynucleotide"
atggccctccctgtcaccgccctgctgcttccgctggctcttctgctccacgccgctcggccccaagtgcaactcgtcgaatccggtggaggtctggtccaacctggtagaagcctgagactgtcgtgtgcggccagcggattcacctttgatgactatgctatgcactgggtgcggcaggccccaggaaagggcctggaatgggtgtcgggaattagctggaactccgggtccattggctacgccgactccgtgaagggccgcttcaccatctcccgcgacaacgcaaagaactccctgtacttgcaaatgaactcgctcagggctgaggataccgcgctgtactactgctccgtgcattccttcctggcctactggggacagggaactctggtcaccgtgtcgagcgcctccggcggcgggggctcgggtggacgggcctcgggcggaggggggtccgacatcgtgatgacccagaccccgctgagcttgcccgtgactcccggagagcctgcatccatctcctgccggtcatcccagtcccttctccactccaacggatacaactacctcgactggtacctccagaagccgggacagagccctcagcttctgatctacctggggtcaaatagagcctcaggagtgccggatcggttcagcggatctggttcgggaactgatttcactctgaagatttcccgcgtggaagccgaggacgtgggcgtctactactgtatgcaggcgctgcagaccccctataccttcggccaagggacgaaagtggagatcaagaccactaccccagcaccgaggccacccaccccggctcctaccatcgcctcccagcctctgtccctgcgtccggaggcatgtagacccgcagctggtggggccgtgcatacccggggtcttgacttcgcctgcgatatctacatttgggcccctctggctggtacttgcggggtcctgctgctttcactcgtgatcactctttactgtaagcgcggtcggaagaagctgctgtacatctttaagcaacccttcatgaggcctgtgcagactactcaagaggaggacggctgttcatgccggttcccagaggaggaggaaggcggctgcgaactgcgcgtgaaattcagccgcagcgcagatgctccagcctacaagcaggggcagaaccagctctacaacgaactcaatcttggtcggagagaggagtacgacgtgctggacaagcggagaggacgggacccagaaatgggcgggaagccgcgcagaaagaatccccaagagggcctgtacaacgagctccaaaaggataagatggcagaagcctatagcgagattggtatgaaaggggaacgcagaagaggcaaaggccacgacggactgtaccagggactcagcaccgccaccaaggacacctatgacgctcttcacatgcaggccctgccgcctcgg

SEQ ID NO: 116 - DNA, 1461 bp, Artificial Sequence
  source: /note="Description of Artificial Sequence: Synthetic polynucleotide"
atggccctccctgtcaccgccctgctgcttccgctggctcttctgctccacgccgctcggcccgaagtgcaattgttggaatctggaggaggacttgtgcagcctggaggatcactgagactttcgtgtgcggtgtcaggcttcgccctgagcaaccacggcatgagctgggtgcggagagccccggggaagggtctggaatgggtgtccgggatcgtctactccggttcaacttactacgccgcaagcgtgaagggtcgcttcaccatttcccgcgataactcccggaacaccctgtacctccaaatgaactccctgcggcccgaggacaccgccatctactactgttccgcgcatggaggagagtccgatgtctggggacagggcactaccgtgaccgtgtcgagcgcctcggggggaggaggctccggcggtcgcgcctccggggggggtggcagcgacattgtgatgacgcagactccactctcgctgtccgtgaccccgggacagcccgcgtccatctcgtgcaagagctcccagagcctgctgaggaacgacggaaagactcctctgtattggtacctccagaaggctggacagcccccgcaactgctcatctacgaagtgtcaaatcgcttctccggggtgccggatcggttttccggctcgggatcgggcaccgacttcaccctgaaaatctccagggtcgaggccgaggacgtgggagcctactactgcatgcaaaacatccagttcccttccttcggcggcggcacaaagctggagattaagaccactaccccagcaccgaggccacccaccccggctcctaccatcgcctcccagcctctgtccctgcgtccggaggcatgtagacccgcagctggtggggccgtgcatacccggggtcttgacttcgcctgcgatatctacatttgggcccctctggctggtacttgcggggtcctgctgctttcactcgtgatcactctttactgtaagcgcggtcggaagaagctgctgtacatctttaagcaacccttcatgaggcctgtgcagactactcaagaggaggacggctgttcatgccggttcccagaggaggaggaaggcggctgcgaactgcgcgtgaaattcagccgcagcgcagatgctccagcctacaagcaggggcagaaccagctctacaacgaactcaatcttggtcggagagaggagtacgacgtgctggacaagcggagaggacgggacccagaaatgggcgggaagccgcgcagaaagaatccccaagagggcctgtacaacgagctccaaaaggataagatggcagaagcctatagcgagattggtatgaaaggggaacgcagaagaggcaaaggccacgacggactgtaccagggactcagcaccgccaccaaggacacctatgacgctcttcacatgcaggccctgccgcctcgg

SEQ ID NO: 117 - DNA, 1479 bp, Artificial Sequence
  source: /note="Description of Artificial Sequence: Synthetic polynucleotide"
atggccctccctgtcaccgccctgctgcttccgctggctcttctgctccacgccgctcggccccaagtccaactcgtccagtccggcgcagaagtcagaaaaaccggtgctagcgtgaaagtgtcctgcaaggcctccggctacattttcgataacttcggaatcaactgggtcagacaggccccgggccaggggctggaatggatgggatggatcaaccccaagaacaacaacaccaactacgcacagaagttccagggccgcgtgactatcaccgccgatgaatcgaccaataccgcctacatggaggtgtcctccctgcggtcggaggacactgccgtgtattactgcgcgaggggcccatactactaccaaagctacatggacgtctggggacagggaaccatggtgaccgtgtcatccgcctccggtggtggaggctccggggggcgggcttcaggaggcggaggaagcgatattgtgatgacccagactccgcttagcctgcccgtgactcctggagaaccggcctccatttcctgccggtcctcgcaatcactcctgcattccaacggttacaactacctgaattggtacctccagaagcctggccagtcgccccagttgctgatctatctgggctcgaagcgcgcctccggggtgcctgaccggtttagcggatctgggagcggcacggacttcactctccacatcacccgcgtgggagcggaggacgtgggagtgtactactgtatgcaggcgctgcagactccgtacacattcggacagggcaccaagctggagatcaagaccactaccccagcaccgaggccacccaccccggctcctaccatcgcctcccagcctctgtccctgcgtccggaggcatgtagacccgcagctggtggggccgtgcatacccggggtcttgacttcgcctgcgatatctacatttgggcccctctggctggtacttgcggggtcctgctgctttcactcgtgatcactctttactgtaagcgcggtcggaagaagctgctgtacatctttaagcaacccttcatgaggcctgtgcagactactcaagaggaggacggctgttcatgccggttcccagaggaggaggaaggcggctgcgaactgcgcgtgaaattcagccgcagcgcagatgctccagcctacaagcaggggcagaaccagctctacaacgaactcaatcttggtcggagagaggagtacgacgtgctggacaagcggagaggacgggacccagaaatgggcgggaagccgcgcagaaagaatccccaagagggcctgtacaacgagctccaaaaggataagatggcagaagcctatagcgagattggtatgaaaggggaacgcagaagaggcaaaggccacgacggactgtaccagggactcagcaccgccaccaaggacacctatgacgctcttcacatgcaggccctgccgcctcgg

SEQ ID NO: 118 - DNA, 1470 bp, Artificial Sequence
  source: /note="Description of Artificial Sequence: Synthetic polynucleotide"
atggccctccctgtcaccgccctgctgcttccgctggctcttctgctccacgccgctcggccccaagtgcaacttcaagaatcaggcggaggactcgtgcagcccggaggatcattgcggctctcgtgcgccgcctcgggcttcaccttctcgagcgacgccatgacctgggtccgccaggccccggggaaggggctggaatgggtgtctgtgatttccggctccgggggaactacgtactacgccgattccgtgaaaggtcgcttcactatctcccgggacaacagcaagaacaccctttatctgcaaatgaattccctccgcgccgaggacaccgccgtgtactactgcgccaagctggactcctcgggctactactatgcccggggtccgagatactggggacagggaaccctcgtgaccgtgtcctccgcgtccggcggaggagggtcgggagggcgggcctccggcggcggcggttcggacatccagctgacccagtccccatcctcactgagcgcaagcgtgggcgacagagtcaccattacatgcagggcgtcccagagcatcagctcctacctgaactggtaccaacagaagcctggaaaggctcctaagctgttgatctacggggcttcgaccctggcatccggggtgcccgcgaggtttagcggaagcggtagcggcactcacttcactctgaccattaacagcctccagtccgaggattcagccacttactactgtcagcagtcctacaagcgggccagcttcggacagggcactaaggtcgagatcaagaccactaccccagcaccgaggccacccaccccggctcctaccatcgcctcccagcctctgtccctgcgtccggaggcatgtagacccgcagctggtggggccgtgcatacccggggtcttgacttcgcctgcgatatctacatttgggcccctctggctggtacttgcggggtcctgctgctttcactcgtgatcactctttactgtaagcgcggtcggaagaagctgctgtacatctttaagcaacccttcatgaggcctgtgcagactactcaagaggaggacggctgttcatgccggttcccagaggaggaggaaggcggctgcgaactgcgcgtgaaattcagccgcagcgcagatgctccagcctacaagcaggggcagaaccagctctacaacgaactcaatcttggtcggagagaggagtacgacgtgctggacaagcggagaggacgggacccagaaatgggcgggaagccgcgcagaaagaatccccaagagggcctgtacaacgagctccaaaaggataagatggcagaagcctatagcgagattggtatgaaaggggaacgcagaagaggcaaaggccacgacggactgtaccagggactcagcaccgccaccaaggacacctatgacgctcttcacatgcaggccctgccgcctcgg

SEQ ID NO: 119 - DNA, 1473 bp, Artificial Sequence
  source: /note="Description of Artificial Sequence: Synthetic polynucleotide"
atggccctccctgtcaccgccctgctgcttccgctggctcttctgctccacgccgctcggccccaagtccaactggtccagagcggtgcagaagtgaagaagcccggagcgagcgtgaaagtgtcctgcaaggcttccgggtacaccttctccaactacggcatcacttgggtgcgccaggccccgggacagggcctggaatggatggggtggatttccgcgtacaacggcaatacgaactacgctcagaagttccagggtagagtgaccatgactaggaacacctccatttccaccgcctacatggaactgtcctccctgcggagcgaggacaccgccgtgtactattgcgcccggggaccatactactactacatggatgtctgggggaaggggactatggtcaccgtgtcatccgcctcgggaggcggcggatcaggaggacgcgcctctggtggtggaggatcggagatcgtgatgacccagagccctctctccttgcccgtgactcctggggagcccgcatccatttcatgccggagctcccagtcacttctctactccaacggctataactacgtggattggtacctccaaaagccgggccagagcccgcagctgctgatctacctgggctcgaacagggccagcggagtgcctgaccggttctccgggtcgggaagcgggaccgacttcaagctgcaaatctcgagagtggaggccgaggacgtgggaatctactactgtatgcagggccgccagtttccgtactcgttcggacagggcaccaaagtggaaatcaagaccactaccccagcaccgaggccacccaccccggctcctaccatcgcctcccagcctctgtccctgcgtccggaggcatgtagacccgcagctggtggggccgtgcatacccggggtcttgacttcgcctgcgatatctacatttgggcccctctggctggtacttgcggggtcctgctgctttcactcgtgatcactctttactgtaagcgcggtcggaagaagctgctgtacatctttaagcaacccttcatgaggcctgtgcagactactcaagaggaggacggctgttcatgccggttcccagaggaggaggaaggcggctgcgaactgcgcgtgaaattcagccgcagcgcagatgctccagcctacaagcaggggcagaaccagctctacaacgaactcaatcttggtcggagagaggagtacgacgtgctggacaagcggagaggacgggacccagaaatgggcgggaagccgcgcagaaagaatccccaagagggcctgtacaacgagctccaaaaggataagatggcagaagcctatagcgagattggtatgaaaggggaacgcagaagaggcaaaggccacgacggactgtaccagggactcagcaccgccaccaaggacacctatgacgctcttcacatgcaggccctgccgcctcgg

SEQ ID NO: 120 - DNA, 1446 bp, Artificial Sequence
  source: /note="Description of Artificial Sequence: Synthetic polynucleotide"
atggccctccctgtcaccgccctgctgcttccgctggctcttctgctccacgccgctcggcccgaagtgcaattgctcgaaactggaggaggtctggtgcaacctggaggatcacttcgcctgtcctgcgccgtgtcgggctttgccctgtccaaccatggaatgagctgggtccgccgcgcgccggggaagggcctcgaatgggtgtccggcatcgtctactccggctccacctactacgccgcgtccgtgaagggccggttcacgatttcacgggacaactcgcggaacaccctgtacctccaaatgaattcccttcggccggaggatactgccatctactactgctccgcccacggtggcgaatccgacgtctggggccagggaaccaccgtgaccgtgtccagcgcgtccgggggaggaggaagcgggggtagagcatcgggtggaggcggatcagagatcgtgctgacccagtcccccgccaccttgagcgtgtcaccaggagagtccgccaccctgtcatgccgcgccagccagtccgtgtcctccaacctggcttggtaccagcagaagccggggcaggcccctagactcctgatctatggggcgtcgacccgggcatctggaattcccgataggttcagcggatcgggctcgggcactgacttcactctgaccatctcctcgctgcaagccgaggacgtggctgtgtactactgtcagcagtacggaagctccctgactttcggtggcgggaccaaagtcgagattaagaccactaccccagcaccgaggccacccaccccggctcctaccatcgcctcccagcctctgtccctgcgtccggaggcatgtagacccgcagctggtggggccgtgcatacccggggtcttgacttcgcctgcgatatctacatttgggcccctctggctggtacttgcggggtcctgctgctttcactcgtgatcactctttactgtaagcgcggtcggaagaagctgctgtacatctttaagcaacccttcatgaggcctgtgcagactactcaagaggaggacggctgttcatgccggttcccagaggaggaggaaggcggctgcgaactgcgcgtgaaattcagccgcagcgcagatgctccagcctacaagcaggggcagaaccagctctacaacgaactcaatcttggtcggagagaggagtacgacgtgctggacaagcggagaggacgggacccagaaatgggcgggaagccgcgcagaaagaatccccaagagggcctgtacaacgagctccaaaaggataagatggcagaagcctatagcgagattggtatgaaaggggaacgcagaagaggcaaaggccacgacggactgtaccagggactcagcaccgccaccaaggacacctatgacgctcttcacatgcaggccctgccgcctcgg

SEQ ID NO: 121 - DNA, 1449 bp, Artificial Sequence
  source: /note="Description of Artificial Sequence: Synthetic polynucleotide"
atggccctccctgtcaccgccctgctgcttccgctggctcttctgctccacgccgctcggcccgaagtgcaattggtggaaactggaggaggacttgtgcaacctggaggatcattgagactgagctgcgcagtgtcgggattcgccctgagcaaccatggaatgtcctgggtcagaagggcccctggaaaaggcctcgaatgggtgtcagggatcgtgtactccggttccacttactacgccgcctccgtgaaggggcgcttcactatctcacgggataactcccgcaataccctgtacctccaaatgaacagcctgcggccggaggataccgccatctactactgttccgcccacggtggagagtctgacgtctggggccagggaactaccgtgaccgtgtcctccgcgtccggcggtggagggagcggcggccgcgccagcggcggcggaggctccgagatcgtgatgacccagagccccgctactctgtcggtgtcgcccggagaaagggcgaccctgtcctgccgggcgtcgcagtccgtgagcagcaagctggcttggtaccagcagaagccgggccaggcaccacgcctgcttatgtacggtgcctccattcgggccaccggaatcccggaccggttctcggggtcggggtccggtaccgagttcacactgaccatttcctcgctcgagcccgaggactttgccgtctattactgccagcagtacggctcctcctcatggacgttcggccaggggaccaaggtcgaaatcaagaccactaccccagcaccgaggccacccaccccggctcctaccatcgcctcccagcctctgtccctgcgtccggaggcatgtagacccgcagctggtggggccgtgcatacccggggtcttgacttcgcctgcgatatctacatttgggcccctctggctggtacttgcggggtcctgctgctttcactcgtgatcactctttactgtaagcgcggtcggaagaagctgctgtacatctttaagcaacccttcatgaggcctgtgcagactactcaagaggaggacggctgttcatgccggttcccagaggaggaggaaggcggctgcgaactgcgcgtgaaattcagccgcagcgcagatgctccagcctacaagcaggggcagaaccagctctacaacgaactcaatcttggtcggagagaggagtacgacgtgctggacaagcggagaggacgggacccagaaatgggcgggaagccgcgcagaaagaatccccaagagggcctgtacaacgagctccaaaaggataagatggcagaagcctatagcgagattggtatgaaaggggaacgcagaagaggcaaaggccacgacggactgtaccagggactcagcaccgccaccaaggacacctatgacgctcttcacatgcaggccctgccgcctcgg

SEQ ID NO: 122 - DNA, 1455 bp, Artificial Sequence
  source: /note="Description of Artificial Sequence: Synthetic polynucleotide"
atggccctccctgtcaccgccctgctgcttccgctggctcttctgctccacgccgctcggcccgaagtgcaattggtggagactggaggaggagtggtgcaacctggaggaagcctgagactgtcatgcgcggtgtcgggcttcgccctctccaaccacggaatgtcctgggtccgccgggcccctgggaaaggacttgaatgggtgtccggcatcgtgtactcgggttccacctactacgcggcctcagtgaagggccggtttactattagccgcgacaactccagaaacacactgtacctccaaatgaactcgctgcggccggaagataccgctatctactactgctccgcccatgggggagagtcggacgtctggggacagggcaccactgtcactgtgtccagcgcttccggcggtggtggaagcgggggacgggcctcaggaggcggtggcagcgagattgtgctgacccagtcccccgggaccctgagcctgtccccgggagaaagggccaccctctcctgtcgggcatcccagtccgtggggtctactaaccttgcatggtaccagcagaagcccggccaggcccctcgcctgctgatctacgacgcgtccaatagagccaccggcatcccggatcgcttcagcggaggcggatcgggcaccgacttcaccctcaccatttcaaggctggaaccggaggacttcgccgtgtactactgccagcagtatggttcgtccccaccctggacgttcggccaggggactaaggtcgagatcaagaccactaccccagcaccgaggccacccaccccggctcctaccatcgcctcccagcctctgtccctgcgtccggaggcatgtagacccgcagctggtggggccgtgcatacccggggtcttgacttcgcctgcgatatctacatttgggcccctctggctggtacttgcggggtcctgctgctttcactcgtgatcactctttactgtaagcgcggtcggaagaagctgctgtacatctttaagcaacccttcatgaggcctgtgcagactactcaagaggaggacggctgttcatgccggttcccagaggaggaggaaggcggctgcgaactgcgcgtgaaattcagccgcagcgcagatgctccagcctacaagcaggggcagaaccagctctacaacgaactcaatcttggtcggagagaggagtacgacgtgctggacaagcggagaggacgggacccagaaatgggcgggaagccgcgcagaaagaatccccaagagggcctgtacaacgagctccaaaaggataagatggcagaagcctatagcgagattggtatgaaaggggaacgcagaagaggcaaaggccacgacggactgtaccagggactcagcaccgccaccaaggacacctatgacgctcttcacatgcaggccctgccgcctcgg

SEQ ID NO: 123 - DNA, 1449 bp, Artificial Sequence
  source: /note="Description of Artificial Sequence: Synthetic polynucleotide"
atggccctccctgtcaccgccctgctgcttccgctggctcttctgctccacgccgctcggccccaagtgcaactcgtggaatctggtggaggactcgtgaaacctggaggatcattgagactgtcatgcgcggcctcgggattcacgttctccgattactacatgagctggattcgccaggctccggggaagggactggaatgggtgtcctacatttcctcatccggctccaccatctactacgcggactccgtgaaggggagattcaccattagccgcgataacgccaagaacagcctgtaccttcagatgaactccctgcgggctgaagatactgccgtctactactgcgcaagggagagcggagatgggatggacgtctggggacagggtaccactgtgaccgtgtcgtcggcctccggcggagggggttcgggtggaagggccagcggcggcggaggcagcgacatccagatgacccagtccccctcatcgctgtccgcctccgtgggcgaccgcgtcaccatcacatgccgggcctcacagtcgatctcctcctacctcaattggtatcagcagaagcccggaaaggcccctaagcttctgatctacgcagcgtcctccctgcaatccggggtcccatctcggttctccggctcgggcagcggtaccgacttcactctgaccatctcgagcctgcagccggaggacttcgccacttactactgtcagcaaagctacaccctcgcgtttggccagggcaccaaagtggacatcaagaccactaccccagcaccgaggccacccaccccggctcctaccatcgcctcccagcctctgtccctgcgtccggaggcatgtagacccgcagctggtggggccgtgcatacccggggtcttgacttcgcctgcgatatctacatttgggcccctctggctggtacttgcggggtcctgctgctttcactcgtgatcactctttactgtaagcgcggtcggaagaagctgctgtacatctttaagcaacccttcatgaggcctgtgcagactactcaagaggaggacggctgttcatgccggttcccagaggaggaggaaggcggctgcgaactgcgcgtgaaattcagccgcagcgcagatgctccagcctacaagcaggggcagaaccagctctacaacgaactcaatcttggtcggagagaggagtacgacgtgctggacaagcggagaggacgggacccagaaatgggcgggaagccgcgcagaaagaatccccaagagggcctgtacaacgagctccaaaaggataagatggcagaagcctatagcgagattggtatgaaaggggaacgcagaagaggcaaaggccacgacggactgtaccagggactcagcaccgccaccaaggacacctatgacgctcttcacatgcaggccctgccgcctcgg

SEQ ID NO: 124 - DNA, 1449 bp, Artificial Sequence
  source: /note="Description of Artificial Sequence: Synthetic polynucleotide"
atggccctccctgtcaccgccctgctgcttccgctggctcttctgctccacgccgctcggcccgaagtgcaattggtggaatcagggggaggacttgtgcagcctggaggatcgctgagactgtcatgtgccgtgtccggctttgccctgtccaaccacgggatgtcctgggtccgccgcgcgcctggaaagggcctcgaatgggtgtcgggtattgtgtacagcggtagcacctactatgccgcatccgtgaaggggagattcaccatcagccgggacaactccaggaacactctgtacctccaaatgaattcgctgaggccagaggacactgccatctactactgctccgcgcatggcggagagtccgacgtctggggacaggggaccaccgtgaccgtgtctagcgcgtccggcggaggcggcagcgggggtcgggcatcagggggcggcggatcggacatccagctcacccagtccccgagctcgctgtccgcctccgtgggagatcgggtcaccatcacgtgccgcgccagccagtcgatttcctcctacctgaactggtaccaacagaagcccggaaaagccccgaagcttctcatctacgccgcctcgagcctgcagtcaggagtgccctcacggttctccggctccggttccggtactgatttcaccctgaccatttcctccctgcaaccggaggacttcgctacttactactgccagcagtcgtactccaccccctacactttcggacaaggcaccaaggtcgaaatcaagaccactaccccagcaccgaggccacccaccccggctcctaccatcgcctcccagcctctgtccctgcgtccggaggcatgtagacccgcagctggtggggccgtgcatacccggggtcttgacttcgcctgcgatatctacatttgggcccctctggctggtacttgcggggtcctgctgctttcactcgtgatcactctttactgtaagcgcggtcggaagaagctgctgtacatctttaagcaacccttcatgaggcctgtgcagactactcaagaggaggacggctgttcatgccggttcccagaggaggaggaaggcggctgcgaactgcgcgtgaaattcagccgcagcgcagatgctccagcctacaagcaggggcagaaccagctctacaacgaactcaatcttggtcggagagaggagtacgacgtgctggacaagcggagaggacgggacccagaaatgggcgggaagccgcgcagaaagaatccccaagagggcctgtacaacgagctccaaaaggataagatggcagaagcctatagcgagattggtatgaaaggggaacgcagaagaggcaaaggccacgacggactgtaccagggactcagcaccgccaccaaggacacctatgacgctcttcacatgcaggccctgccgcctcgg

SEQ ID NO: 125 - DNA, 1470 bp, Artificial Sequence
  source: /note="Description of Artificial Sequence: Synthetic polynucleotide"
atggccctccctgtcaccgccctgctgcttccgctggctcttctgctccacgccgctcggccccaagtgcaactggtgcaaagcggaggaggattggtcaaacccggaggaagcctgagactgtcatgcgcggcctctggattcaccttctccgattactacatgtcatggatcagacaggccccggggaagggcctcgaatgggtgtcctacatctcgtcctccgggaacaccatctactacgccgacagcgtgaagggccgctttaccatttcccgcgacaacgcaaagaactcgctgtaccttcagatgaattccctgcgggctgaagataccgcggtgtactattgcgcccggtccactatggtccgggaggactactggggacagggcacactcgtgaccgtgtccagcgcgagcgggggtggaggcagcggtggacgcgcctccggcggcggcggttcagacatcgtgctgactcagtcgcccctgtcgctgccggtcaccctgggccaaccggcctcaattagctgcaagtcctcggagagcctggtgcacaactcaggaaagacttacctgaactggttccatcagcggcctggacagtccccacggaggctcatctatgaagtgtccaacagggattcgggggtgcccgaccgcttcactggctccgggtccggcaccgacttcaccttgaaaatctccagagtggaagccgaggacgtgggcgtgtactactgtatgcagggtacccactggcctggaacctttggacaaggaactaagctcgagattaagaccactaccccagcaccgaggccacccaccccggctcctaccatcgcctcccagcctctgtccctgcgtccggaggcatgtagacccgcagctggtggggccgtgcatacccggggtcttgacttcgcctgcgatatctacatttgggcccctctggctggtacttgcggggtcctgctgctttcactcgtgatcactctttactgtaagcgcggtcggaagaagctgctgtacatctttaagcaacccttcatgaggcctgtgcagactactcaagaggaggacggctgttcatgccggttcccagaggaggaggaaggcggctgcgaactgcgcgtgaaattcagccgcagcgcagatgctccagcctacaagcaggggcagaaccagctctacaacgaactcaatcttggtcggagagaggagtacgacgtgctggacaagcggagaggacgggacccagaaatgggcgggaagccgcgcagaaagaatccccaagagggcctgtacaacgagctccaaaaggataagatggcagaagcctatagcgagattggtatgaaaggggaacgcagaagaggcaaaggccacgacggactgtaccagggactcagcaccgccaccaaggacacctatgacgctcttcacatgcaggccctgccgcctcgg

SEQ ID NO: 126 - DNA, 1449 bp, Artificial Sequence
  source: /note="Description of Artificial Sequence: Synthetic polynucleotide"
atggccctccctgtcaccgccctgctgcttccgctggctcttctgctccacgccgctcggccccaagtgcaactcgtggaatctggtggaggactcgtgcaacccggtggaagccttaggctgtcgtgcgccgtcagcgggtttgctctgagcaaccatggaatgtcctgggtccgccgggcaccgggaaaagggctggaatgggtgtccggcatcgtgtacagcgggtcaacctattacgccgcgtccgtgaagggcagattcactatctcaagagacaacagccggaacaccctgtacttgcaaatgaattccctgcgccccgaggacaccgccatctactactgctccgcccacggaggagagtcggacgtgtggggccagggaacgactgtgactgtgtccagcgcatcaggagggggtggttcgggcggccgggcctcggggggaggaggttccgacattcggctgacccagtccccgtccccactgtcggcctccgtcggcgaccgcgtgaccatcacttgtcaggcgtccgaggacattaacaagttcctgaactggtaccaccagacccctggaaaggcccccaagctgctgatctacgatgcctcgacccttcaaactggagtgcctagccggttctccgggtccggctccggcactgatttcactctgaccatcaactcattgcagccggaagatatcgggacctactattgccagcagtacgaatccctcccgctcacattcggcgggggaaccaaggtcgagattaagaccactaccccagcaccgaggccacccaccccggctcctaccatcgcctcccagcctctgtccctgcgtccggaggcatgtagacccgcagctggtggggccgtgcatacccggggtcttgacttcgcctgcgatatctacatttgggcccctctggctggtacttgcggggtcctgctgctttcactcgtgatcactctttactgtaagcgcggtcggaagaagctgctgtacatctttaagcaacccttcatgaggcctgtgcagactactcaagaggaggacggctgttcatgccggttcccagaggaggaggaaggcggctgcgaactgcgcgtgaaattcagccgcagcgcagatgctccagcctacaagcaggggcagaaccagctctacaacgaactcaatcttggtcggagagaggagtacgacgtgctggacaagcggagaggacgggacccagaaatgggcgggaagccgcgcagaaagaatccccaagagggcctgtacaacgagctccaaaaggataagatggcagaagcctatagcgagattggtatgaaaggggaacgcagaagaggcaaaggccacgacggactgtaccagggactcagcaccgccaccaaggacacctatgacgctcttcacatgcaggccctgccgcctcgg

SEQ ID NO: 127 - DNA, 1452 bp, Artificial Sequence
  source: /note="Description of Artificial Sequence: Synthetic polynucleotide"
atggccctccctgtcaccgccctgctgcttccgctggctcttctgctccacgccgctcggcccgaagtgcaattggtggaaactggaggaggacttgtgcaacctggaggatcattgcggctctcatgcgctgtctccggcttcgccctgtcaaatcacgggatgtcgtgggtcagacgggccccgggaaagggtctggaatgggtgtcggggattgtgtacagcggctccacctactacgccgcttcggtcaagggccgcttcactatttcacgggacaacagccgcaacaccctctatctgcaaatgaactctctccgcccggaggataccgccatctactactgctccgcacacggcggcgaatccgacgtgtggggacagggaaccactgtcaccgtgtcgtccgcatccggtggcggaggatcgggtggccgggcctccgggggcggcggcagcgagactaccctgacccagtcccctgccactctgtccgtgagcccgggagagagagccacccttagctgccgggccagccagagcgtgggctccaacctggcctggtaccagcagaagccaggacagggtcccaggctgctgatctacggagcctccactcgcgcgaccggcatccccgcgaggttctccgggtcgggttccgggaccgagttcaccctgaccatctcctccctccaaccggaggacttcgcggtgtactactgtcagcagtacaacgattggctgcccgtgacatttggacaggggacgaaggtggaaatcaaaaccactaccccagcaccgaggccacccaccccggctcctaccatcgcctcccagcctctgtccctgcgtccggaggcatgtagacccgcagctggtggggccgtgcatacccggggtcttgacttcgcctgcgatatctacatttgggcccctctggctggtacttgcggggtcctgctgctttcactcgtgatcactctttactgtaagcgcggtcggaagaagctgctgtacatctttaagcaacccttcatgaggcctgtgcagactactcaagaggaggacggctgttcatgccggttcccagaggaggaggaaggcggctgcgaactgcgcgtgaaattcagccgcagcgcagatgctccagcctacaagcaggggcagaaccagctctacaacgaactcaatcttggtcggagagaggagtacgacgtgctggacaagcggagaggacgggacccagaaatgggcgggaagccgcgcagaaagaatccccaagagggcctgtacaacgagctccaaaaggataagatggcagaagcctatagcgagattggtatgaaaggggaacgcagaagaggcaaaggccacgacggactgtaccagggactcagcaccgccaccaaggacacctatgacgctcttcacatgcaggccctgccgcctcgg

SEQ ID NO: 128 - DNA, 1455 bp, Artificial Sequence
  source: /note="Description of Artificial Sequence: Synthetic polynucleotide"
atggccctccctgtcaccgccctgctgcttccgctggctcttctgctccacgccgctcggcccgaagtgcaattggtggaatctggtggaggacttgtgcaacctggaggatcactgagactgtcatgcgcggtgtccggttttgccctgagcaatcatgggatgtcgtgggtccggcgcgcccccggaaagggtctggaatgggtgtcgggtatcgtctactccgggagcacttactacgccgcgagcgtgaagggccgcttcaccatttcccgcgataactcccgcaacaccctgtacttgcaaatgaactcgctccggcctgaggacactgccatctactactgctccgcacacggaggagaatccgacgtgtggggccagggaactaccgtgaccgtcagcagcgcctccggcggcgggggctcaggcggacgggctagcggcggcggtggctccgagatcgtgctgacccagtcgcctggcactctctcgctgagccccggggaaagggcaaccctgtcctgtcgggccagccagtccattggatcatcctccctcgcctggtatcagcagaaaccgggacaggctccgcggctgcttatgtatggggccagctcaagagcctccggcattcccgaccggttctccgggtccggttccggcaccgatttcaccctgactatctcgaggctggagccagaggacttcgccgtgtactactgccagcagtacgcggggtccccgccgttcacgttcggacagggaaccaaggtcgagatcaagaccactaccccagcaccgaggccacccaccccggctcctaccatcgcctcccagcctctgtccctgcgtccggaggcatgtagacccgcagctggtggggccgtgcatacccggggtcttgacttcgcctgcgatatctacatttgggcccctctggctggtacttgcggggtcctgctgctttcactcgtgatcactctttactgtaagcgcggtcggaagaagctgctgtacatctttaagcaacccttcatgaggcctgtgcagactactcaagaggaggacggctgttcatgccggttcccagaggaggaggaaggcggctgcgaactgcgcgtgaaattcagccgcagcgcagatgctccagcctacaagcaggggcagaaccagctctacaacgaactcaatcttggtcggagagaggagtacgacgtgctggacaagcggagaggacgggacccagaaatgggcgggaagccgcgcagaaagaatccccaagagggcctgtacaacgagctccaaaaggataagatggcagaagcctatagcgagattggtatgaaaggggaacgcagaagaggcaaaggccacgacggactgtaccagggactcagcaccgccaccaaggacacctatgacgctcttcacatgcaggccctgccgcctcgg

SEQ ID NO: 129 - protein, 243 aa, Artificial Sequence
  source: /note="Description of Artificial Sequence: Synthetic polypeptide"
QVQLQESGPGLVKPSETLSLTCTVSGGSISSSYYYWGWIRQPPGKGLEWIGSIYYSGSAYYNPSLKSRVTISVDTSKNQFSLRLSSVTAADTAVYYCARHWQEWPDAFDIWGQGTMVTVSSGGGGSGGGGSGGGGSETTLTQSPAFMSATPGDKVIISCKASQDIDDAMNWYQQKPGEAPLFIIQSATSPVPGIPPRFSGSGFGTDFSLTINNIESEDAAYYFCLQHDNFPLTFGQGTKLEIK

SEQ ID NO: 130 - protein, 244 aa, Artificial Sequence
  source: /note="Description of Artificial Sequence: Synthetic polypeptide"
VNLRESGPALVKPTQTLTLTCTFSGFSLRTSGMCVSWIRQPPGKALEWLARIDWDEDKFYSTSLKTRLTISKDTSDNQVVLRMTNMDPADTATYYCARSGAGGTSATAFDIWGPGTMVTVSSGGGGSGGGGSGGGGSDIQMTQSPSSLSASVGDRVTITCRASQDIYNNLAWFQLKPGSAPRSLMYAANKSQSGVPSRFSGSASGTDFTLTISSLQPEDFATYYCQHYYRFPYSFGQGTKLEIK

SEQ ID NO: 131 - protein, 246 aa, Artificial Sequence
  source: /note="Description of Artificial Sequence: Synthetic polypeptide"
EVQLVESGGGLVKPGGSLRLSCAASGFTFSSYSMNWVRQAPGKGLEWVSSISSSSSYIYYADSVKGRFTISRDNAKNSLYLQMNSLRAEDTAVYYCAKTIAAVYAFDIWGQGTTVTVSSGGGGSGGGGSGGGGSEIVLTQSPLSLPVTPEEPASISCRSSQSLLHSNGYNYLDWYLQKPGQSPQLLIYLGSNRASGVPDRFSGSGSGTDFTLKISRVEAEDVGVYYCMQALQTPYTFGQGTKLEIK

SEQ ID NO: 132 - protein, 240 aa, Artificial Sequence
  source: /note="Description of Artificial Sequence: Synthetic polypeptide"
EVQLVESGGGLVKPGGSLRLSCAASGFTFSDYYMSWIRQAPGKGLEWVSYISSSGSTIYYADSVKGRFTISRDNAKNSLYLQMNSLRAEDTAVYYCARDLRGAFDIWGQGTMVTVSSGGGGSGGGGSGGGGSSYVLTQSPSVSAAPGYTATISCGGNNIGTKSVHWYQQKPGQAPLLVIRDDSVRPSKIPGRFSGSNSGNMATLTISGVQAGDEADFYCQVWDSDSEHVVFGGGTKLTVL

SEQ ID NO: 133 - protein, 241 aa, Artificial Sequence
  source: /note="Description of Artificial Sequence: Synthetic polypeptide"
QVQLVQSGAEVKKPGASVKVSCKPSGYTVTSHYIHWVRRAPGQGLEWMGMINPSGGVTAYSQTLQGRVTMTSDTSSSTVYMELSSLRSEDTAMYYCAREGSGSGWYFDFWGRGTLVTVSSGGGGSGGGGSGGGGSSYVLTQPPSVSVSPGQTASITCSGDGLSKKYVSWYQQKAGQSPVVLISRDKERPSGIPDRFSGSNSADTATLTISGTQAMDEADYYCQAWDDTTVVFGGGTKLTVL

SEQ ID NO: 134 - protein, 245 aa, Artificial Sequence
  source: /note="Description of Artificial Sequence: Synthetic polypeptide"
QVQLQESGPGLVKPSQTLSLTCTVSGGSISSGGYYWSWIRQHPGKGLEWIGYIYYSGSTYYNPSLKSRVTISVDTSKNQFSLKLSSVTAADTAVYYCARAGIAARLRGAFDIWGQGTMVTVSSGGGGSGGGGSGGGGSDIVMTQSPSSVSASVGDRVIITCRASQGIRNWLAWYQQKPGKAPNLLIYAASNLQSGVPSRFSGSGSGADFTLTISSLQPEDVATYYCQKYNSAPFTFGPGTKVDIK

SEQ ID NO: 135 - protein, 253 aa, Artificial Sequence
  source: /note="Description of Artificial Sequence: Synthetic polypeptide"
QVQLVQSGAEVKKPGSSVKVSCKASGGTFSSYAISWVRQAPGQGLEWMGGIIPIFGTANYAQKFQGRVTITADESTSTAYMELSSLRSEDTAVYYCARRGGYQLLRWDVGLLRSAFDIWGQGTMVTVSSGGGGSGGGGSGGGGSSYVLTQPPSVSVAPGQTARITCGGNNIGSKSVHWYQQKPGQAPVLVLYGKNNRPSGVPDRFSGSRSGTTASLTITGAQAEDEADYYCSSRDSSGDHLRVFGTGTKVTVL

SEQ ID NO: 136 - protein, 248 aa, Artificial Sequence
  source: /note="Description of Artificial Sequence: Synthetic polypeptide"
EVQLQQSGPGLVKPSQTLSLTCAISGDSVSSNSAAWNWIRQSPSRGLEWLGRTYYRSKWYSFYAISLKSRIIINPDTSKNQFSLQLKSVTPEDTAVYYCARSSPEGLFLYWFDPWGQGTLVTVSSGGDGSGGGGSGGGGSSSELTQDPAVSVALGQTIRITCQGDSLGNYYATWYQQKPGQAPVLVIYGTNNRPSGIPDRFSASSSGNTASLTITGAQAEDEADYYCNSRDSSGHHLLFGTGTKVTVL

SEQ ID NO: 137 - protein, 246 aa, Artificial Sequence
  source: /note="Description of Artificial Sequence: Synthetic polypeptide"
EVQLVESGGGLVQPGGSLRLSCAASGFTFSSYAMSWVRQAPGKGLEWVSAISGSGGSTYYADSVKGRFTISRDNSKNTLYLQMNSLRAEDTAVYYCAKVEGSGSLDYWGQGTLVTVSSGGGGSGGGGSGGGGSEIVMTQSPGTLSLSPGERATLSCRASQSVSSAYLAWYQQKPGQPPRLLISGASTRATGIPDRFGGSGSGTDFTLTISRLEPEDFAVYYCQHYGSSFNGSSLFTFGQGTRLEIK

SEQ ID NO: 138 - protein, 241 aa, Artificial Sequence
  source: /note="Description of Artificial Sequence: Synthetic polypeptide"
EVQLVETGGGLVQPGGSLRLSCAASGITFSRYPMSWVRQAPGKGLEWVSGISDSGVSTYYADSAKGRFTISRDNSKNTLFLQMSSLRDEDTAVYYCVTRAGSEASDIWGQGTMVTVSSGGGGSGGGGSGGGGSEIVLTQSPATLSLSPGERATLSCRASQSVSNSLAWYQQKPGQAPRLLIYDASSRATGIPDRFSGSGSGTDFTLTISRLEPEDFAIYYCQQFGTSSGLTFGGGTKLEIK

SEQ ID NO: 139 - protein, 248 aa, Artificial Sequence
  source: /note="Description of Artificial Sequence: Synthetic polypeptide"
QVQLVESGGGLVQPGGSLRLSCAASGFTFSSYAMSWVRQAPGKGLEWVSAISGSGGSTYYADSVKGRFTISRDNAKNSLYLQMNSLRAEDTAIYYCARATYKRELRYYYGMDVWGQGTMVTVSSGGGGSGGGGSGGGGSEIVMTQSPGTVSLSPGERATLSCRASQSVSSSFLAWYQQKPGQAPRLLIYGASSRATGIPDRFSGSGSGTDFTLTISRLEPEDSAVYYCQQYHSSPSWTFGQGTRLEIK

SEQ ID NO: 140 - protein, 248 aa, Artificial Sequence
  source: /note="Description of Artificial Sequence: Synthetic polypeptide"
EVQLVETGGGLVQPGGSLRLSCAASGFTFSSYAMSWVRQAPGKGLEWVSAISGSGGSTYYADSVKGRFTISRDNSKNTLYLQMNTLKAEDTAVYYCARATYKRELRYYYGMDVWGQGTTVTVSSGGGGSGGGGSGGGGSEIVLTQSPSTLSLSPGESATLSCRASQSVSTTFLAWYQQKPGQAPRLLIYGSSNRATGIPDRFSGSGSGTDFTLTIRRLEPEDFAVYYCQQYHSSPSWTFGQGTKVEIK

SEQ ID NO: 141 - protein, 239 aa, Artificial Sequence
  source: /note="Description of Artificial Sequence: Synthetic polypeptide"
EVQLVETGGGLVQPGRSLRLSCAASGFTFDDYAMHWVRQAPGKGLEWVSGISWNSGSIGYADSVKGRFTISRDNAKNSLYLQMNSLRDEDTAVYYCARVGKAVPDVWGQGTTVTVSSGGGGSGGGGSGGGGSDIVMTQTPSSLSASVGDRVTITCRASQSISSYLNWYQQKPGKAPKLLIYAASSLQSGVPSRFSGSGSGTDFTLTISSLQPEDFATYYCQQSYSTPYSFGQGTRLEIK

SEQ ID NO: 142 - protein, 246 aa, Artificial Sequence
  source: /note="Description of Artificial Sequence: Synthetic polypeptide"
EVQLVESGGGLVQPGRSLRLSCTASGFTFDDYAMHWVRQRPGKGLEWVASINWKGNSLAYGDSVKGRFAISRDNAKNTVFLQMNSLRTEDTAVYYCASHQGVAYYNYAMDVWGRGTLVTVSSGGGGSGGGGSGGGGSEIVLTQSPGTLSLSPGERATLSCRATQSIGSSFLAWYQQRPGQAPRLLIYGASQRATGIPDRFSGRGSGTDFTLTISRVEPEDSAVYYCQHYESSPSWTFGQGTKVEIK

SEQ ID NO: 143 - protein, 241 aa, Artificial Sequence
  source: /note="Description of Artificial Sequence: Synthetic polypeptide"
EVQLVESGGGLVQPGGSLRLSCAASGFTFSSYAMSWVRQAPGKGLEWVSAISGSGGSTYYADSVKGRFTISRDNSKNTLYLQMNSLRAEDTAVYYCAKVVRDGMDVWGQGTTVTVSSGGGGSGGGGSGGGGSEIVLTQSPATLSLSPGERATLSCRASQSVSSSYLAWYQQKPGQAPRLLIYGASSRATGIPDRFSGNGSGTDFTLTISRLEPEDFAVYYCQQYGSPPRFTFGPGTKVDIK

SEQ ID NO: 144 - protein, 242 aa, Artificial Sequence
  source: /note="Description of Artificial Sequence: Synthetic polypeptide"
EVQLLESGGGLVQPGGSLRLSCAASGFTFSSYAMSWVRQAPGKGLEWVSAISGSGGSTYYADSVKGRFTISRDNSKNTLYLQMNSLRAEDTAVYYCAKIPQTGTFDYWGQGTLVTVSSGGGGSGGGGSGGGGSEIVLTQSPGTLSLSPGERATLSCRASQSVSSSYLAWYQQRPGQAPRLLIYGASSRATGIPDRFSGSGSGTDFTLTISRLEPEDFAVYYCQHYGSSPSWTFGQGTRLEIK

SEQ ID NO: 145 - protein, 248 aa, Artificial Sequence
  source: /note="Description of Artificial Sequence: Synthetic polypeptide"
EVQLVETGGGLVQPGGSLRLSCAASGFTFSSYAMSWVRQAPGKGLEWVSAISGSGGSTYYADSVKGRFTMSRENDKNSVFLQMNSLRVEDTGVYYCARANYKRELRYYYGMDVWGQGTMVTVSSGGGGSGGGGSGGGGSEIVMTQSPGTLSLSPGESATLSCRASQRVASNYLAWYQHKPGQAPSLLISGASSRATGVPDRFSGSGSGTDFTLAISRLEPEDSAVYYCQHYDSSPSWTFGQGTKVEIK

SEQ ID NO: 146 - protein, 244 aa, Artificial Sequence
  source: /note="Description of Artificial Sequence: Synthetic polypeptide"
EVQLLETGGGLVQPGGSLRLSCAASGFSFSSYAMSWVRQAPGKGLEWVSAISGSGGSTYYADSVKGRFTISRDNSKNTLYLQMNSLRAEDTAVYYCAKALVGATGAFDIWGQGTLVTVSSGGGGSGGGGSGGGGSEIVLTQSPGTLSLSPGERATLSCRASQSLSSNFLAWYQQKPGQAPGLLIYGASNWATGTPDRFSGSGSGTDFTLTITRLEPEDFAVYYCQYYGTSPMYTFGQGTKVEIK

SEQ ID NO: 147 - protein, 244 aa, Artificial Sequence
  source: /note="Description of Artificial Sequence: Synthetic polypeptide"
EVQLLESGGGLVQPGGSLRLSCAASGFTFSSYAMSWVRQAPGKGLEWVSAISGSGGSTYYADSVKGRFTISRDNSKNTLYLQMNSLRAEDTAVYYCVLWFGEGFDPWGQGTLVTVSSGGGGSGGGGSGGGGSDIVLTQSPLSLPVTPGEPASISCRSSQSLLHSNGYNYLDWYLQKPGQSPQLLIYLGSNRASGVPDRFSGSGSGTDFTLKISRVEAEDVGVYYCMQALQTPLTFGGGTKVDIK

SEQ ID NO: 148 - protein, 251 aa, Artificial Sequence
  source: /note="Description of Artificial Sequence: Synthetic polypeptide"
QVQLVESGGGLVQPGGSLRLSCAASGFTFSSYAMSWVRQAPGKGLEWVSAISGSGGSTYYADSVKGRFTISRDNSKNTLYLQMNSLRAEDTAVYYCAKVGYDSSGYYRDYYGMDVWGQGTTVTVSSGGGGSGGGGSGGGGSEIVLTQSPGTLSLSPGERATLSCRASQSVSSSYLAWYQQKPGQAPRLLIYGTSSRATGISDRFSGSGSGTDFTLTISRLEPEDFAVYYCQHYGNSPPKFTFGPGTKLEIK

SEQ ID NO: 149 - protein, 246 aa, Artificial Sequence
  source: /note="Description of Artificial Sequence: Synthetic polypeptide"
EVQLVESGGGLVQPGGSLRLSCAASGFTFSSYAMSWVRQAPGKGLEWVSAISGSGGSTYYADSVKGRFTISRDNSKNTLYLQMNSLRAEDTAVYYCAKMGWSSGYLGAFDIWGQGTTVTVSSGGGGSGGGGSGGGGSEIVLTQSPGTLSLSPGERATLSCRASQSVASSFLAWYQQKPGQAPRLLIYGASGRATGIPDRFSGSGSGTDFTLTISRLEPEDFAVYYCQHYGGSPRLTFGGGTKVDIK

SEQ ID NO: 150 - DNA, 729 bp, Artificial Sequence
  source: /note="Description of Artificial Sequence: Synthetic polynucleotide"
caagtgcagcttcaggaaagcggaccgggcctggtcaagccatccgaaactctctccctgacttgcactgtgtctggcggttccatctcatcgtcgtactactactggggctggattaggcagccgcccggaaagggactggagtggatcggaagcatctactattccggctcggcgtactacaaccctagcctcaagtcgagagtgaccatctccgtggatacctccaagaaccagttttccctgcgcctgagctccgtgaccgccgctgacaccgccgtgtactactgtgctcggcattggcaggaatggcccgatgccttcgacatttggggccagggcactatggtcactgtgtcatccgggggtggaggcagcgggggaggagggtccggggggggaggttcagagacaaccttgacccagtcacccgcattcatgtccgccactccgggagacaaggtcatcatctcgtgcaaagcgtcccaggatatcgacgatgccatgaattggtaccagcagaagcctggcgaagcgccgctgttcattatccaatccgcaacctcgcccgtgcctggaatcccaccgcggttcagcggcagcggtttcggaaccgacttttccctgaccattaacaacattgagtccgaggacgccgcctactacttctgcctgcaacacgacaacttccctctcacgttcggccagggaaccaagctggaaatcaag

SEQ ID NO: 151 - DNA, 735 bp, Artificial Sequence
  source: /note="Description of Artificial Sequence: Synthetic polynucleotide"
caagtcaatctgcgcgaatccggccccgccttggtcaagcctacccagaccctcactctgacctgtactttctccggcttctccctgcggacttccgggatgtgcgtgtcctggatcagacagcctccgggaaaggccctggagtggctcgctcgcattgactgggatgaggacaagttctactccacctcactcaagaccaggctgaccatcagcaaagatacctctgacaaccaagtggtgctccgcatgaccaacatggacccagccgacactgccacttactactgcgcgaggagcggagcgggcggaacctccgccaccgccttcgatatttggggcccgggtaccatggtcaccgtgtcaagcggaggaggggggtccgggggcggcggttccgggggaggcggatcggacattcagatgactcagtcaccatcgtccctgagcgctagcgtgggcgacagagtgacaatcacttgccgggcatcccaggacatctataacaaccttgcgtggttccagctgaagcctggttccgcaccgcggtcacttatgtacgccgccaacaagagccagtcgggagtgccgtcccggttttccggttcggcctcgggaactgacttcaccctgacgatctccagcctgcaacccgaggatttcgccacctactactgccagcactactaccgctttccctactcgttcggacagggaaccaagctggaaatcaag

SEQ ID NO: 152 - DNA, 738 bp, Artificial Sequence
  source: /note="Description of Artificial Sequence: Synthetic polynucleotide"
gaagtgcagcttgtcgaatccggggggggactggtcaagccgggcggatcactgagactgtcctgcgccgcgagcggcttcacgttctcctcctactccatgaactgggtccgccaagcccccgggaagggactggaatgggtgtcctctatctcctcgtcgtcgtcctacatctactacgccgactccgtgaagggaagattcaccatttcccgcgacaacgcaaagaactcactgtacttgcaaatgaactcactccgggccgaagatactgctgtgtactattgcgccaagactattgccgccgtctacgctttcgacatctggggccagggaaccaccgtgactgtgtcgtccggtggtggtggctcgggcggaggaggaagcggcggcggggggtccgagattgtgctgacccagtcgccactgagcctccctgtgacccccgaggaacccgccagcatcagctgccggtccagccagtccctgctccactccaacggatacaattacctcgattggtaccttcagaagcctggacaaagcccgcagctgctcatctacttgggatcaaaccgcgcgtcaggagtgcctgaccggttctccggctcgggcagcggtaccgatttcaccctgaaaatctccagggtggaggcagaggacgtgggagtgtattactgtatgcaggcgctgcagactccgtacacatttgggcagggcaccaagctggagatcaag

SEQ ID NO: 153 - DNA, 720 bp, Artificial Sequence
  source: /note="Description of Artificial Sequence: Synthetic polynucleotide"
gaagtccagctcgtggagtccggcggaggccttgtgaagcctggaggttcgctgagactgtcctgcgccgcctccggcttcaccttctccgactactacatgtcctggatcagacaggccccgggaaagggcctggaatgggtgtcctacatctcgtcatcgggcagcactatctactacgcggactcagtgaaggggcggttcaccatttcccgggataacgcgaagaactcgctgtatctgcaaatgaactcactgagggccgaggacaccgccgtgtactactgcgcccgcgatctccgcggggcatttgacatctggggacagggaaccatggtcacagtgtccagcggagggggaggatcgggtggcggaggttccgggggtggaggctcctcctacgtgctgactcagagcccaagcgtcagcgctgcgcccggttacacggcaaccatctcctgtggcggaaacaacattgggaccaagtctgtgcactggtatcagcagaagccgggccaagctcccctgttggtgatccgcgatgactccgtgcggcctagcaaaattccgggacggttctccggctccaacagcggcaatatggccactctcaccatctcgggagtgcaggccggagatgaagccgacttctactgccaagtctgggactcagactccgagcatgtggtgttcgggggcggaaccaagctgactgtgctc

SEQ ID NO: 154 - DNA, 723 bp, Artificial Sequence
  source: /note="Description of Artificial Sequence: Synthetic polynucleotide"
caagtgcagctggtgcagagcggggccgaagtcaagaagccgggagcctccgtgaaagtgtcctgcaagccttcgggatacaccgtgacctcccactacattcattgggtccgccgcgcccccggccaaggactcgagtggatgggcatgatcaaccctagcggcggagtgaccgcgtacagccagacgctgcagggacgcgtgactatgacctcggatacctcctcctccaccgtctatatggaactgtccagcctgcggtccgaggataccgccatgtactactgcgcccgggaaggatcaggctccgggtggtatttcgacttctggggaagaggcaccctcgtgactgtgtcatctgggggagggggttccggtggtggcggatcgggaggaggcggttcatcctacgtgctgacccagccaccctccgtgtccgtgagccccggccagactgcatcgattacatgtagcggcgacggcctctccaagaaatacgtgtcgtggtaccagcagaaggccggacagagcccggtggtgctgatctcaagagataaggagcggcctagcggaatcccggacaggttctcgggttccaactccgcggacactgctactctgaccatctcggggacccaggctatggacgaagccgattactactgccaagcctgggacgacactactgtcgtgtttggagggggcaccaagttgaccgtcctt

SEQ ID NO: 155 - DNA, 735 bp, Artificial Sequence
  source: /note="Description of Artificial Sequence: Synthetic polynucleotide"
caagtgcagcttcaggagagcggcccgggactcgtgaagccgtcccagaccctgtccctgacttgcaccgtgtcgggaggaagcatctcgagcggaggctactattggtcgtggattcggcagcaccctggaaagggcctggaatggatcggctacatctactactccggctcgacctactacaacccatcgctgaagtccagagtgacaatctcagtggacacgtccaagaatcagttcagcctgaagctctcttccgtgactgcggccgacaccgccgtgtactactgcgcacgcgctggaattgccgcccggctgaggggtgccttcgacatttggggacagggcaccatggtcaccgtgtcctccggcggcggaggttccgggggtggaggctcaggaggaggggggtccgacatcgtcatgactcagtcgccctcaagcgtcagcgcgtccgtcggggacagagtgatcatcacctgtcgggcgtcccagggaattcgcaactggctggcctggtatcagcagaagcccggaaaggcccccaacctgttgatctacgccgcctcaaacctccaatccggggtgccgagccgcttcagcggctccggttcgggtgccgatttcactctgaccatctcctccctgcaacctgaagatgtggctacctactactgccaaaagtacaactccgcaccttttactttcggaccggggaccaaagtggacattaag

SEQ ID NO: 156 - DNA, 759 bp, Artificial Sequence
  source: /note="Description of Artificial Sequence: Synthetic polynucleotide"
caagtgcagctggtccagtcgggcgccgaggtcaagaagcccgggagctctgtgaaagtgtcctgcaaggcctccgggggcacctttagctcctacgccatctcctgggtccgccaagcaccgggtcaaggcctggagtggatggggggaattatccctatcttcggcactgccaactacgcccagaagttccagggacgcgtgaccattaccgcggacgaatccacctccaccgcttatatggagctgtccagcttgcgctcggaagataccgccgtgtactactgcgcccggaggggtggataccagctgctgagatgggacgtgggcctcctgcggtcggcgttcgacatctggggccagggcactatggtcactgtgtccagcggaggaggcggatcgggaggcggcggatcagggggaggcggttccagctacgtgcttactcaacccccttcggtgtccgtggccccgggacagaccgccagaatcacttgcggaggaaacaacattgggtccaagagcgtgcattggtaccagcagaagccaggacaggcccctgtgctggtgctctacgggaagaacaatcggcccagcggagtgccggacaggttctcgggttcacgctccggtacaaccgcttcactgactatcaccggggcccaggcagaggatgaagcggactactactgttcctcccgggattcatccggcgaccacctccgggtgttcggaaccggaacgaaggtcaccgtgctg

SEQ ID NO: 157 - DNA, 744 bp, Artificial Sequence
  source: /note="Description of Artificial Sequence: Synthetic polynucleotide"
gaagtgcagctccaacagtcaggaccggggctcgtgaagccatcccagaccctgtccctgacttgtgccatctcgggagatagcgtgtcatcgaactccgccgcctggaactggattcggcagagcccgtcccgcggactggagtggcttggaaggacctactaccggtccaagtggtactctttctacgcgatctcgctgaagtcccgcattatcattaaccctgatacctccaagaatcagttctccctccaactgaaatccgtcacccccgaggacacagcagtgtattactgcgcacggagcagccccgaaggactgttcctgtattggtttgacccctggggccaggggactcttgtgaccgtgtcgagcggcggagatgggtccggtggcggtggttcggggggcggcggatcatcatccgaactgacccaggacccggctgtgtccgtggcgctgggacaaaccatccgcattacgtgccagggagactccctgggcaactactacgccacttggtaccagcagaagccgggccaagcccctgtgttggtcatctacgggaccaacaacagaccttccggcatccccgaccggttcagcgcttcgtcctccggcaacactgccagcctgaccatcactggagcgcaggccgaagatgaggccgactactactgcaacagcagagactcctcgggtcatcacctcttgttcggaactggaaccaaggtcaccgtgctg

SEQ ID NO: 158 - DNA, 738 bp, Artificial Sequence
  source: /note="Description of Artificial Sequence: Synthetic polynucleotide"
gaagtgcagctcgtggagtcaggaggcggcctggtccagccgggagggtcccttagactgtcatgcgccgcaagcggattcactttctcctcctatgccatgagctgggtccgccaagcccccggaaagggactggaatgggtgtccgccatctcggggtctggaggctcaacttactacgctgactccgtgaagggacggttcaccattagccgcgacaactccaagaacaccctctacctccaaatgaactccctgcgggccgaggataccgccgtctactactgcgccaaagtggaaggttcaggatcgctggactactggggacagggtactctcgtgaccgtgtcatcgggcggaggaggttccggcggtggcggctccggcggcggagggtcggagatcgtgatgacccagagccctggtactctgagcctttcgccgggagaaagggccaccctgtcctgccgcgcttcccaatccgtgtcctccgcgtacttggcgtggtaccagcagaagccgggacagccccctcggctgctgatcagcggggccagcacccgggcaaccggaatcccagacagattcgggggttccggcagcggcacagatttcaccctgactatttcgaggttggagcccgaggactttgcggtgtattactgtcagcactacgggtcgtcctttaatggctccagcctgttcacgttcggacaggggacccgcctggaaatcaag

SEQ ID NO: 159 - DNA, 723 bp, Artificial Sequence
  source: /note="Description of Artificial Sequence: Synthetic polynucleotide"
gaagtgcaactggtggaaaccggtggcggcctggtgcagcctggaggatcattgaggctgtcatgcgcggccagcggtattaccttctcccggtaccccatgtcctgggtcagacaggccccggggaaagggcttgaatgggtgtccgggatctcggactccggtgtcagcacttactacgccgactccgccaagggacgcttcaccatttcccgggacaactcgaagaacaccctgttcctccaaatgagctccctccgggacgaggatactgcagtgtactactgcgtgacccgcgccgggtccgaggcgtctgacatttggggacagggcactatggtcaccgtgtcgtccggcggagggggctcgggaggcggtggcagcggaggaggagggtccgagatcgtgctgacccaatccccggccaccctctcgctgagccctggagaaagggcaaccttgtcctgtcgcgcgagccagtccgtgagcaactccctggcctggtaccagcagaagcccggacaggctccgagacttctgatctacgacgcttcgagccgggccactggaatccccgaccgcttttcggggtccggctcaggaaccgatttcaccctgacaatctcacggctggagccagaggatttcgccatctattactgccagcagttcggtacttcctccggcctgactttcggaggcggcacgaagctcgaaatcaag

SEQ ID NO: 160 - DNA, 744 bp, Artificial Sequence
  source: /note="Description of Artificial Sequence: Synthetic polynucleotide"
caagtgcagctcgtggaatcgggtggcggactggtgcagccggggggctcacttagactgtcctgcgcggccagcggattcactttctcctcctacgccatgtcctgggtcagacaggcccctggaaagggcctggaatgggtgtccgcaatcagcggcagcggcggctcgacctattacgcggattcagtgaagggcagattcaccatttcccgggacaacgccaagaactccttgtaccttcaaatgaactccctccgcgcggaagataccgcaatctactactgcgctcgggccacttacaagagggaactgcgctactactacgggatggacgtctggggccagggaaccatggtcaccgtgtccagcggaggaggaggatcgggaggaggcggtagcgggggtggagggtcggagatcgtgatgacccagtcccccggcactgtgtcgctgtcccccggcgaacgggccaccctgtcatgtcgggccagccagtcagtgtcgtcaagcttcctcgcctggtaccagcagaaaccgggacaagctccccgcctgctgatctacggagccagcagccgggccaccggtattcctgaccggttctccggttcggggtccgggaccgactttactctgactatctctcgcctcgagccagaggactccgccgtgtattactgccagcagtaccactcctccccgtcctggacgttcggacagggcacaaggctggagattaag

SEQ ID NO: 161 - DNA, 744 bp, Artificial Sequence
  source: /note="Description of Artificial Sequence: Synthetic polynucleotide"
gaggtgcagcttgtggaaaccggtggcggactggtgcagcccggaggaagcctcaggctgtcctgcgccgcgtccggcttcaccttctcctcgtacgccatgtcctgggtccgccaggcccccggaaagggcctggaatgggtgtccgccatctctggaagcggaggttccacgtactacgcggacagcgtcaagggaaggttcacaatctcccgcgataattcgaagaacactctgtaccttcaaatgaacaccctgaaggccgaggacactgctgtgtactactgcgcacgggccacctacaagagagagctccggtactactacggaatggacgtctggggccagggaactactgtgaccgtgtcctcgggagggggtggctccggggggggcggctccggcggaggcggttccgagattgtgctgacccagtcaccttcaactctgtcgctgtccccgggagagagcgctactctgagctgccgggccagccagtccgtgtccaccaccttcctcgcctggtatcagcagaagccggggcaggcaccacggctcttgatctacgggtcaagcaacagagcgaccggaattcctgaccgcttctcggggagcggttcaggcaccgacttcaccctgactatccggcgcctggaacccgaagatttcgccgtgtattactgtcaacagtaccactcctcgccgtcctggacctttggccaaggaaccaaagtggaaatcaag

SEQ ID NO: 162 - DNA, 717 bp, Artificial Sequence
  source: /note="Description of Artificial Sequence: Synthetic polynucleotide"
gaagtgcagctcgtggaaactggaggtggactcgtgcagcctggacggtcgctgcggctgagctgcgctgcatccggcttcaccttcgacgattatgccatgcactgggtcagacaggcgccagggaagggacttgagtgggtgtccggtatcagctggaatagcggctcaatcggatacgcggactccgtgaagggaaggttcaccatttcccgcgacaacgccaagaactccctgtacttgcaaatgaacagcctccgggatgaggacactgccgtgtactactgcgcccgcgtcggaaaagctgtgcccgacgtctggggccagggaaccactgtgaccgtgtccagcggcgggggtggatcgggcggtggagggtccggtggagggggctcagatattgtgatgacccagaccccctcgtccctgtccgcctcggtcggcgaccgcgtgactatcacatgtagagcctcgcagagcatctccagctacctgaactggtatcagcagaagccggggaaggccccgaagctcctgatctacgcggcatcatcactgcaatcgggagtgccgagccggttttccgggtccggctccggcaccgacttcacgctgaccatttcttccctgcaacccgaggacttcgccacttactactgccagcagtcctactccaccccttactccttcggccaaggaaccaggctggaaatcaag

SEQ ID NO: 163 - DNA, 738 bp, Artificial Sequence
  source: /note="Description of Artificial Sequence: Synthetic polynucleotide"
gaagtgcagctcgtggagagcgggggaggattggtgcagcccggaaggtccctgcggctctcctgcactgcgtctggcttcaccttcgacgactacgcgatgcactgggtcagacagcgcccgggaaagggcctggaatgggtcgcctcaatcaactggaagggaaactccctggcctatggcgacagcgtgaagggccgcttcgccatttcgcgcgacaacgccaagaacaccgtgtttctgcaaatgaattccctgcggaccgaggataccgctgtgtactactgcgccagccaccagggcgtggcatactataactacgccatggacgtgtggggaagagggacgctcgtcaccgtgtcctccgggggcggtggatcgggtggaggaggaagcggtggcgggggcagcgaaatcgtgctgactcagagcccgggaactctttcactgtccccgggagaacgggccactctctcgtgccgggccacccagtccatcggctcctccttccttgcctggtaccagcagaggccaggacaggcgccccgcctgctgatctacggtgcttcccaacgcgccactggcattcctgaccggttcagcggcagagggtcgggaaccgatttcacactgaccatttcccgggtggagcccgaagattcggcagtctactactgtcagcattacgagtcctccccttcatggaccttcggtcaagggaccaaagtggagatcaag

SEQ ID NO: 164 - DNA, 723 bp, Artificial Sequence
  source: /note="Description of Artificial Sequence: Synthetic polynucleotide"
gaggtgcagttggtcgaaagcgggggcgggcttgtgcagcctggcggatcactgcggctgtcctgcgcggcatcaggcttcacgttttcttcctacgccatgtcctgggtgcgccaggcccctggaaagggactggaatgggtgtccgcgatttcggggtccggcgggagcacctactacgccgattccgtgaagggccgcttcactatctcgcgggacaactccaagaacaccctctacctccaaatgaatagcctgcgggccgaggataccgccgtctactattgcgctaaggtcgtgcgcgacggaatggacgtgtggggacagggtaccaccgtgacagtgtcctcggggggaggcggtagcggcggaggaggaagcggtggtggaggttccgagattgtgctgactcaatcacccgcgaccctgagcctgtcccccggcgaaagggccactctgtcctgtcgggccagccaatcagtctcctcctcgtacctggcctggtaccagcagaagccaggacaggctccgagactccttatctatggcgcatcctcccgcgccaccggaatcccggataggttctcgggaaacggatcggggaccgacttcactctcaccatctcccggctggaaccggaggacttcgccgtgtactactgccagcagtacggcagcccgcctagattcactttcggccccggcaccaaagtggacatcaag

SEQ ID NO: 165 - DNA, 726 bp, Artificial Sequence
  source: /note="Description of Artificial Sequence: Synthetic polynucleotide"
gaagtgcagctgctggagtccggcggtggattggtgcaaccggggggatcgctcagactgtcctgtgcggcgtcaggcttcaccttctcgagctacgccatgtcatgggtcagacaggcccctggaaagggtctggaatgggtgtccgccatttccgggagcgggggatctacatactacgccgatagcgtgaagggccgcttcaccatttcccgggacaactccaagaacactctctatctgcaaatgaactccctccgcgctgaggacactgccgtgtactactgcgccaaaatccctcagaccggcaccttcgactactggggacaggggactctggtcaccgtcagcagcggtggcggaggttcggggggaggaggaagcggcggcggagggtccgagattgtgctgacccagtcacccggcactttgtccctgtcgcctggagaaagggccaccctttcctgccgggcatcccaatccgtgtcctcctcgtacctggcctggtaccagcagaggcccggacaggccccacggcttctgatctacggagcaagcagccgcgcgaccggtatcccggaccggttttcgggctcgggctcaggaactgacttcaccctcaccatctcccgcctggaacccgaagatttcgctgtgtattactgccagcactacggcagctccccgtcctggacgttcggccagggaactcggctggagatcaag

SEQ ID NO: 166 - DNA, 744 bp, Artificial Sequence
  source: /note="Description of Artificial Sequence: Synthetic polynucleotide"
gaagtgcaactggtggaaaccggtggaggactcgtgcagcctggcggcagcctccggctgagctgcgccgcttcgggattcaccttttcctcctacgcgatgtcttgggtcagacaggcccccggaaaggggctggaatgggtgtcagccatctccggctccggcggatcaacgtactacgccgactccgtgaaaggccggttcaccatgtcgcgcgagaatgacaagaactccgtgttcctgcaaatgaactccctgagggtggaggacaccggagtgtactattgtgcgcgcgccaactacaagagagagctgcggtactactacggaatggacgtctggggacagggaactatggtgaccgtgtcatccggtggagggggaagcggcggtggaggcagcgggggcgggggttcagaaattgtcatgacccagtccccgggaactctttccctctcccccggggaatccgcgactttgtcctgccgggccagccagcgcgtggcctcgaactacctcgcatggtaccagcataagccaggccaagccccttccctgctgatttccggggctagcagccgcgccactggcgtgccggataggttctcgggaagcggctcgggtaccgatttcaccctggcaatctcgcggctggaaccggaggattcggccgtgtactactgccagcactatgactcatccccctcctggacattcggacagggcaccaaggtcgagatcaag

SEQ ID NO: 167 - DNA, 732 bp, Artificial Sequence
  source: /note="Description of Artificial Sequence: Synthetic polynucleotide"
gaagtgcagctgctcgaaaccggtggagggctggtgcagccagggggctccctgaggctttcatgcgccgctagcggattctccttctcctcttacgccatgtcgtgggtccgccaagcccctggaaaaggcctggaatgggtgtccgcgatttccgggagcggaggttcgacctattacgccgactccgtgaagggccgctttaccatctcccgggataactccaagaacactctgtacctccaaatgaactcgctgagagccgaggacaccgccgtgtattactgcgcgaaggcgctggtcggcgcgactggggcattcgacatctggggacagggaactcttgtgaccgtgtcgagcggaggcggcggctccggcggaggagggagcgggggcggtggttccgaaatcgtgttgactcagtccccgggaaccctgagcttgtcacccggggagcgggccactctctcctgtcgcgcctcccaatcgctctcatccaatttcctggcctggtaccagcagaagcccggacaggccccgggcctgctcatctacggcgcttcaaactgggcaacgggaacccctgatcggttcagcggaagcggatcgggtactgactttaccctgaccatcaccagactggaaccggaggacttcgccgtgtactactgccagtactacggcacctcccccatgtacacattcggacagggtaccaaggtcgagattaag

SEQ ID NO: 168 - DNA, 733 bp, Artificial Sequence
  source: /note="Description of Artificial Sequence: Synthetic polynucleotide"
gaagtgcagctgcttgagagcggtggaggtctggtgcagcccgggggatcactgcgcctgtcctgtgccgcgtccggtttcactttctcctcgtacgccatgtcgtgggtcagacaggcaccgggaaagggactggaatgggtgtcagccatttcgggttcggggggcagcacctactacgctgactccgtgaagggccggttcaccatttcccgcgacaactccaagaacaccttgtacctccaaatgaactccctgcgggccgaagataccgccgtgtattactgcgtgctgtggttcggagagggattcgacccgtggggacaaggaacactcgtgactgtgtcatccggcggaggcggcagcggtggcggcggttccggcggcggcggatctgacatcgtgttgacccagtcccctctgagcctgccggtcactcctggcgaaccagccagcatctcctgccggtcgagccagtccctcctgcactccaatgggtacaactacctcgattggtatctgcaaaagccgggccagagcccccagctgctgatctaccttgggtcaaaccgcgcttccggggtgcctgatagattctccgggtccgggagcggaaccgactttaccctgaaaatctcgagggtggaggccgaggacgtcggagtgtactactgcatgcaggcgctccagactcccctgaccttcggaggaggaacgaaggtcgacatcaaga

SEQ ID NO: 169 - DNA, 753 bp, Artificial Sequence
  source: /note="Description of Artificial Sequence: Synthetic polynucleotide"
caagtgcagctcgtggagtcaggcggaggactggtgcagcccgggggctccctgagactttcctgcgcggcatcgggttttaccttctcctcctatgctatgtcctgggtgcgccaggccccgggaaagggactggaatgggtgtccgcaatcagcggtagcgggggctcaacatactacgccgactccgtcaagggtcgcttcactatttcccgggacaactccaagaataccctgtacctccaaatgaacagcctcagggccgaggatactgccgtgtactactgcgccaaagtcggatacgatagctccggttactaccgggactactacggaatggacgtgtggggacagggcaccaccgtgaccgtgtcaagcggcggaggcggttcaggagggggaggctccggcggtggagggtccgaaatcgtcctgactcagtcgcctggcactctgtcgttgtccccgggggagcgcgctaccctgtcgtgtcgggcgtcgcagtccgtgtcgagctcctacctcgcgtggtaccagcagaagcccggacaggcccctagacttctgatctacggcacttcttcacgcgccaccgggatcagcgacaggttcagcggctccggctccgggaccgacttcaccctgaccattagccggctggagcctgaagatttcgccgtgtattactgccaacactacggaaactcgccgccaaagttcacgttcggacccggaaccaagctggaaatcaag

SEQ ID NO: 170 - DNA, 739 bp, Artificial Sequence
  source: /note="Description of Artificial Sequence: Synthetic polynucleotide"
gaagtccaactggtggagtccgggggagggctcgtgcagcccggaggcagccttcggctgtcgtgcgccgcctccgggttcacgttctcatcctacgcgatgtcgtgggtcagacaggcaccaggaaagggactggaatgggtgtccgccattagcggctccggcggtagcacctactatgccgactcagtgaagggaaggttcactatctcccgcgacaacagcaagaacaccctgtacctccaaatgaactctctgcgggccgaggataccgcggtgtactattgcgccaagatgggttggtccagcggatacttgggagccttcgacatttggggacagggcactactgtgaccgtgtcctccgggggtggcggatcgggaggcggcggctcgggtggagggggttccgaaatcgtgttgacccagtcaccgggaaccctctcgctgtccccgggagaacgggctacactgtcatgtagagcgtcccagtccgtggcttcctcgttcctggcctggtaccagcagaagccgggacaggcaccccgcctgctcatctacggagccagcggccgggcgaccggcatccctgaccgcttctccggttccggctcgggcaccgactttactctgaccattagcaggcttgagcccgaggattttgccgtgtactactgccaacactacggggggagccctcgcctgaccttcggaggcggaactaaggtcgatatcaaaa

SEQ ID NO: 171 - protein, 121 aa, Artificial Sequence
  source: /note="Description of Artificial Sequence: Synthetic polypeptide"
QVQLQESGPGLVKPSETLSLTCTVSGGSISSSYYYWGWIRQPPGKGLEWIGSIYYSGSAYYNPSLKSRVTISVDTSKNQFSLRLSSVTAADTAVYYCARHWQEWPDAFDIWGQGTMVTVSS

SEQ ID NO: 172 - protein, 123 aa, Artificial Sequence
  source: /note="Description of Artificial Sequence: Synthetic polypeptide"
QVNLRESGPALVKPTQTLTLTCTFSGFSLRTSGMCVSWIRQPPGKALEWLARIDWDEDKFYSTSLKTRLTISKDTSDNQVVLRMTNMDPADTATYYCARSGAGGTSATAFDIWGPGTMVTVSS

SEQ ID NO: 173 - protein, 119 aa, Artificial Sequence
  source: /note="Description of Artificial Sequence: Synthetic polypeptide"
EVQLVESGGGLVKPGGSLRLSCAASGFTFSSYSMNWVRQAPGKGLEWVSSISSSSSYIYYADSVKGRFTISRDNAKNSLYLQMNSLRAEDTAVYYCAKTIAAVYAFDIWGQGTTVTVSS

SEQ ID NO: 174 - protein, 117 aa, Artificial Sequence
  source: /note="Description of Artificial Sequence: Synthetic polypeptide"
EVQLVESGGGLVKPGGSLRLSCAASGFTFSDYYMSWIRQAPGKGLEWVSYISSSGSTIYYADSVKGRFTISRDNAKNSLYLQMNSLRAEDTAVYYCARDLRGAFDIWGQGTMVTVSS

SEQ ID NO: 175 - protein, 120 aa, Artificial Sequence
  source: /note="Description of Artificial Sequence: Synthetic polypeptide"
QVQLVQSGAEVKKPGASVKVSCKPSGYTVTSHYIHWVRRAPGQGLEWMGMINPSGGVTAYSQTLQGRVTMTSDTSSSTVYMELSSLRSEDTAMYYCAREGSGSGWYFDFWGRGTLVTVSS

SEQ ID NO: 176 - protein, 123 aa, Artificial Sequence
  source: /note="Description of Artificial Sequence: Synthetic polypeptide"
QVQLQESGPGLVKPSQTLSLTCTVSGGSISSGGYYWSWIRQHPGKGLEWIGYIYYSGSTYYNPSLKSRVTISVDTSKNQFSLKLSSVTAADTAVYYCARAGIAARLRGAFDIWGQGTMVTVSS

SEQ ID NO: 177 - protein, 129 aa, Artificial Sequence
  source: /note="Description of Artificial Sequence: Synthetic polypeptide"
QVQLVQSGAEVKKPGSSVKVSCKASGGTFSSYAISWVRQAPGQGLEWMGGIIPIFGTANYAQKFQGRVTITADESTSTAYMELSSLRSEDTAVYYCARRGGYQLLRWDVGLLRSAFDIWGQGTMVTVSS

SEQ ID NO: 178 - protein, 125 aa, Artificial Sequence
  source: /note="Description of Artificial Sequence: Synthetic polypeptide"
EVQLQQSGPGLVKPSQTLSLTCAISGDSVSSNSAAWNWIRQSPSRGLEWLGRTYYRSKWYSFYAISLKSRIIINPDTSKNQFSLQLKSVTPEDTAVYYCARSSPEGLFLYWFDPWGQGTLVTVSS

SEQ ID NO: 179 - protein, 118 aa, Artificial Sequence
  source: /note="Description of Artificial Sequence: Synthetic polypeptide"
EVQLVESGGGLVQPGGSLRLSCAASGFTFSSYAMSWVRQAPGKGLEWVSAISGSGGSTYYADSVKGRFTISRDNSKNTLYLQMNSLRAEDTAVYYCAKVEGSGSLDYWGQGTLVTVSS

SEQ ID NO: 180 - protein, 118 aa, Artificial Sequence
  source: /note="Description of Artificial Sequence: Synthetic polypeptide"
EVQLVETGGGLVQPGGSLRLSCAASGITFSRYPMSWVRQAPGKGLEWVSGISDSGVSTYYADSAKGRFTISRDNSKNTLFLQMSSLRDEDTAVYYCVTRAGSEASDIWGQGTMVTVSS

SEQ ID NO: 181 - protein, 124 aa, Artificial Sequence
  source: /note="Description of Artificial Sequence: Synthetic polypeptide"
QVQLVESGGGLVQPGGSLRLSCAASGFTFSSYAMSWVRQAPGKGLEWVSAISGSGGSTYYADSVKGRFTISRDNAKNSLYLQMNSLRAEDTAIYYCARATYKRELRYYYGMDVWGQGTMVTVSS

SEQ ID NO: 182 - protein, 124 aa, Artificial Sequence
  source: /note="Description of Artificial Sequence: Synthetic polypeptide"
EVQLVETGGGLVQPGGSLRLSCAASGFTFSSYAMSWVRQAPGKGLEWVSAISGSGGSTYYADSVKGRFTISRDNSKNTLYLQMNTLKAEDTAVYYCARATYKRELRYYYGMDVWGQGTTVTVSS

SEQ ID NO: 183 - protein, 117 aa, Artificial Sequence
  source: /note="Description of Artificial Sequence: Synthetic polypeptide"
EVQLVETGGGLVQPGRSLRLSCAASGFTFDDYAMHWVRQAPGKGLEWVSGISWNSGSIGYADSVKGRFTISRDNAKNSLYLQMNSLRDEDTAVYYCARVGKAVPDVWGQGTTVTVSS

SEQ ID NO: 184 - protein, 122 aa, Artificial Sequence
  source: /note="Description of Artificial Sequence: Synthetic polypeptide"
EVQLVESGGGLVQPGRSLRLSCTASGFTFDDYAMHWVRQRPGKGLEWVASINWKGNSLAYGDSVKGRFAISRDNAKNTVFLQMNSLRTEDTAVYYCASHQGVAYYNYAMDVWGRGTLVTVSS

SEQ ID NO: 185 - protein, 117 aa, Artificial Sequence
  source: /note="Description of Artificial Sequence: Synthetic polypeptide"
EVQLVESGGGLVQPGGSLRLSCAASGFTFSSYAMSWVRQAPGKGLEWVSAISGSGGSTYYADSVKGRFTISRDNSKNTLYLQMNSLRAEDTAVYYCAKVVRDGMDVWGQGTTVTVSS

SEQ ID NO: 186 - protein, 118 aa, Artificial Sequence
  source: /note="Description of Artificial Sequence: Synthetic polypeptide"
EVQLLESGGGLVQPGGSLRLSCAASGFTFSSYAMSWVRQAPGKGLEWVSAISGSGGSTYYADSVKGRFTISRDNSKNTLYLQMNSLRAEDTAVYYCAKIPQTGTFDYWGQGTLVTVSS

SEQ ID NO: 187 - protein, 124 aa, Artificial Sequence
  source: /note="Description of Artificial Sequence: Synthetic polypeptide"
EVQLVETGGGLVQPGGSLRLSCAASGFTFSSYAMSWVRQAPGKGLEWVSAISGSGGSTYYADSVKGRFTMSRENDKNSVFLQMNSLRVEDTGVYYCARANYKRELRYYYGMDVWGQGTMVTVSS

SEQ ID NO: 188 - protein, 120 aa, Artificial Sequence
  source: /note="Description of Artificial Sequence: Synthetic polypeptide"
EVQLLETGGGLVQPGGSLRLSCAASGFSFSSYAMSWVRQAPGKGLEWVSAISGSGGSTYYADSVKGRFTISRDNSKNTLYLQMNSLRAEDTAVYYCAKALVGATGAFDIWGQGTLVTVSS

SEQ ID NO: 189 - protein, 117 aa, Artificial Sequence
  source: /note="Description of Artificial Sequence: Synthetic polypeptide"
EVQLLESGGGLVQPGGSLRLSCAASGFTFSSYAMSWVRQAPGKGLEWVSAISGSGGSTYYADSVKGRFTISRDNSKNTLYLQMNSLRAEDTAVYYCVLWFGEGFDPWGQGTLVTVSS

SEQ ID NO: 190 - protein, 126 aa, Artificial Sequence
  source: /note="Description of Artificial Sequence: Synthetic polypeptide"
QVQLVESGGGLVQPGGSLRLSCAASGFTFSSYAMSWVRQAPGKGLEWVSAISGSGGSTYYADSVKGRFTISRDNSKNTLYLQMNSLRAEDTAVYYCAKVGYDSSGYYRDYYGMDVWGQGTTVTVSS

SEQ ID NO: 191 - protein, 122 aa, Artificial Sequence
  source: /note="Description of Artificial Sequence: Synthetic polypeptide"
EVQLVESGGGLVQPGGSLRLSCAASGFTFSSYAMSWVRQAPGKGLEWVSAISGSGGSTYYADSVKGRFTISRDNSKNTLYLQMNSLRAEDTAVYYCAKMGWSSGYLGAFDIWGQGTTVTVSS

SEQ ID NO: 192 - protein, 107 aa, Artificial Sequence
  source: /note="Description of Artificial Sequence: Synthetic polypeptide"
ETTLTQSPAFMSATPGDKVIISCKASQDIDDAMNWYQQKPGEAPLFIIQSATSPVPGIPPRFSGSGFGTDFSLTINNIESEDAAYYFCLQHDNFPLTFGQGTKLEIK

SEQ ID NO: 193 - protein, 107 aa, Artificial Sequence
  source: /note="Description of Artificial Sequence: Synthetic polypeptide"
DIQMTQSPSSLSASVGDRVTITCRASQDIYNNLAWFQLKPGSAPRSLMYAANKSQSGVPSRFSGSASGTDFTLTISSLQPEDFATYYCQHYYRFPYSFGQGTKLEIK

SEQ ID NO: 194 - protein, 112 aa, Artificial Sequence
  source: /note="Description of Artificial Sequence: Synthetic polypeptide"
EIVLTQSPLSLPVTPEEPASISCRSSQSLLHSNGYNYLDWYLQKPGQSPQLLIYLGSNRASGVPDRFSGSGSGTDFTLKISRVEAEDVGVYYCMQALQTPYTFGQGTKLEIK

SEQ ID NO: 195 - protein, 108 aa, Artificial Sequence
  source: /note="Description of Artificial Sequence: Synthetic polypeptide"
SYVLTQSPSVSAAPGYTATISCGGNNIGTKSVHWYQQKPGQAPLLVIRDDSVRPSKIPGRFSGSNSGNMATLTISGVQAGDEADFYCQVWDSDSEHVVFGGGTKLTVL

SEQ ID NO: 196 - protein, 106 aa, Artificial Sequence
  source: /note="Description of Artificial Sequence: Synthetic polypeptide"
SYVLTQPPSVSVSPGQTASITCSGDGLSKKYVSWYQQKAGQSPVVLISRDKERPSGIPDRFSGSNSADTATLTISGTQAMDEADYYCQAWDDTTVVFGGGTKLTVL

SEQ ID NO: 197 - protein, 107 aa, Artificial Sequence
  source: /note="Description of Artificial Sequence: Synthetic polypeptide"
DIVMTQSPSSVSASVGDRVIITCRASQGIRNWLAWYQQKPGKAPNLLIYAASNLQSGVPSRFSGSGSGADFTLTISSLQPEDVATYYCQKYNSAPFTFGPGTKVDIK

SEQ ID NO: 198 - protein, 109 aa, Artificial Sequence
  source: /note="Description of Artificial Sequence: Synthetic polypeptide"
SYVLTQPPSVSVAPGQTARITCGGNNIGSKSVHWYQQKPGQAPVLVLYGKNNRPSGVPDRFSGSRSGTTASLTITGAQAEDEADYYCSSRDSSGDHLRVFGTGTKVTVL

SEQ ID NO: 199 - protein, 108 aa, Artificial Sequence
  source: /note="Description of Artificial Sequence: Synthetic polypeptide"
SSELTQDPAVSVALGQTIRITCQGDSLGNYYATWYQQKPGQAPVLVIYGTNNRPSGIPDRFSASSSGNTASLTITGAQAEDEADYYCNSRDSSGHHLLFGTGTKVTVL

SEQ ID NO: 200 - protein, 113 aa, Artificial Sequence
  source: /note="Description of Artificial Sequence: Synthetic polypeptide"
EIVMTQSPGTLSLSPGERATLSCRASQSVSSAYLAWYQQKPGQPPRLLISGASTRATGIPDRFGGSGSGTDFTLTISRLEPEDFAVYYCQHYGSSFNGSSLFTFGQGTRLEIK

SEQ ID NO: 201 - protein, 108 aa, Artificial Sequence
  source: /note="Description of Artificial Sequence: Synthetic polypeptide"
EIVLTQSPATLSLSPGERATLSCRASQSVSNSLAWYQQKPGQAPRLLIYDASSRATGIPDRFSGSGSGTDFTLTISRLEPEDFAIYYCQQFGTSSGLTFGGGTKLEIK

SEQ ID NO: 202 - protein, 109 aa, Artificial Sequence
  source: /note="Description of Artificial Sequence: Synthetic polypeptide"
EIVMTQSPGTVSLSPGERATLSCRASQSVSSSFLAWYQQKPGQAPRLLIYGASSRATGIPDRFSGSGSGTDFTLTISRLEPEDSAVYYCQQYHSSPSWTFGQGTRLEIK

SEQ ID NO: 203 - protein, 109 aa, Artificial Sequence
  source: /note="Description of Artificial Sequence: Synthetic polypeptide"
EIVLTQSPSTLSLSPGESATLSCRASQSVSTTFLAWYQQKPGQAPRLLIYGSSNRATGIPDRFSGSGSGTDFTLTIRRLEPEDFAVYYCQQYHSSPSWTFGQGTKVEIK

SEQ ID NO: 204 - protein, 107 aa, Artificial Sequence
  source: /note="Description of Artificial Sequence: Synthetic polypeptide"
DIVMTQTPSSLSASVGDRVTITCRASQSISSYLNWYQQKPGKAPKLLIYAASSLQSGVPSRFSGSGSGTDFTLTISSLQPEDFATYYCQQSYSTPYSFGQGTRLEIK

SEQ ID NO: 205 - protein, 109 aa, Artificial Sequence
  source: /note="Description of Artificial Sequence: Synthetic polypeptide"
EIVLTQSPGTLSLSPGERATLSCRATQSIGSSFLAWYQQRPGQAPRLLIYGASQRATGIPDRFSGRGSGTDFTLTISRVEPEDSAVYYCQHYESSPSWTFGQGTKVEIK

SEQ ID NO: 206 - protein, 109 aa, Artificial Sequence
  source: /note="Description of Artificial Sequence: Synthetic polypeptide"
EIVLTQSPATLSLSPGERATLSCRASQSVSSSYLAWYQQKPGQAPRLLIYGASSRATGIPDRFSGNGSGTDFTLTISRLEPEDFAVYYCQQYGSPPRFTFGPGTKVDIK

SEQ ID NO: 207 - protein, 109 aa, Artificial Sequence
  source: /note="Description of Artificial Sequence: Synthetic polypeptide"
EIVLTQSPGTLSLSPGERATLSCRASQSVSSSYLAWYQQRPGQAPRLLIYGASSRATGIPDRFSGSGSGTDFTLTISRLEPEDFAVYYCQHYGSSPSWTFGQGTRLEIK

SEQ ID NO: 208 - protein, 109 aa, Artificial Sequence
  source: /note="Description of Artificial Sequence: Synthetic polypeptide"
EIVMTQSPGTLSLSPGESATLSCRASQRVASNYLAWYQHKPGQAPSLLISGASSRATGVPDRFSGSGSGTDFTLAISRLEPEDSAVYYCQHYDSSPSWTFGQGTKVEIK

SEQ ID NO: 209 - protein, 109 aa, Artificial Sequence
  source: /note="Description of Artificial Sequence: Synthetic polypeptide"
EIVLTQSPGTLSLSPGERATLSCRASQSLSSNFLAWYQQKPGQAPGLLIYGASNWATGTPDRFSGSGSGTDFTLTITRLEPEDFAVYYCQYYGTSPMYTFGQGTKVEIK

SEQ ID NO: 210 - protein, 112 aa, Artificial Sequence
  source: /note="Description of Artificial Sequence: Synthetic polypeptide"
DIVLTQSPLSLPVTPGEPASISCRSSQSLLHSNGYNYLDWYLQKPGQSPQLLIYLGSNRASGVPDRFSGSGSGTDFTLKISRVEAEDVGVYYCMQALQTPLTFGGGTKVDIK

SEQ ID NO: 211 - protein, 110 aa, Artificial Sequence
  source: /note="Description of Artificial Sequence: Synthetic polypeptide"
EIVLTQSPGTLSLSPGERATLSCRASQSVSSSYLAWYQQKPGQAPRLLIYGTSSRATGISDRFSGSGSGTDFTLTISRLEPEDFAVYYCQHYGNSPPKFTFGPGTKLEIK

SEQ ID NO: 212 - protein, 109 aa, Artificial Sequence
  source: /note="Description of Artificial Sequence: Synthetic polypeptide"
EIVLTQSPGTLSLSPGERATLSCRASQSVASSFLAWYQQKPGQAPRLLIYGASGRATGIPDRFSGSGSGTDFTLTISRLEPEDFAVYYCQHYGGSPRLTFGGGTKVDIK

SEQ ID NO: 213 - protein, 487 aa, Artificial Sequence
  source: /note="Description of Artificial Sequence: Synthetic polypeptide"
MALPVTALLLPLALLLHAARPQVQLQESGPGLVKPSETLSLTCTVSGGSISSSYYYWGWIRQPPGKGLEWIGSIYYSGSAYYNPSLKSRVTISVDTSKNQFSLRLSSVTAADTAVYYCARHWQEWPDAFDIWGQGTMVTVSSGGGGSGGGGSGGGGSETTLTQSPAFMSATPGDKVIISCKASQDIDDAMNWYQQKPGEAPLFIIQSATSPVPGIPPRFSGSGFGTDFSLTINNIESEDAAYYFCLQHDNFPLTFGQGTKLEIKTTTPAPRPPTPAPTIASQPLSLRPEACRPAAGGAVHTRGLDFACDIYIWAPLAGTCGVLLLSLVITLYCKRGRKKLLYIFKQPFMRPVQTTQEEDGCSCRFPEEEEGGCELRVKFSRSADAPAYKQGQNQLYNELNLGRREEYDVLDKRRGRDPEMGGKPRRKNPQEGLYNELQKDKMAEAYSEIGMKGERRRGKGHDGLYQGLSTATKDTYDALHMQALPPR

SEQ ID NO: 214 - protein, 489 aa, Artificial Sequence
  source: /note="Description of Artificial Sequence: Synthetic polypeptide"
MALPVTALLLPLALLLHAARPQVNLRESGPALVKPTQTLTLTCTFSGFSLRTSGMCVSWIRQPPGKALEWLARIDWDEDKFYSTSLKTRLTISKDTSDNQVVLRMTNMDPADTATYYCARSGAGGTSATAFDIWGPGTMVTVSSGGGGSGGGGSGGGGSDIQMTQSPSSLSASVGDRVTITCRASQDIYNNLAWFQLKPGSAPRSLMYAANKSQSGVPSRFSGSASGTDFTLTISSLQPEDFATYYCQHYYRFPYSFGQGTKLEIKTTTPAPRPPTPAPTIASQPLSLRPEACRPAAGGAVHTRGLDFACDIYIWAPLAGTCGVLLLSLVITLYCKRGRKKLLYIFKQPFMRPVQTTQEEDGCSCRFPEEEEGGCELRVKFSRSADAPAYKQGQNQLYNELNLGRREEYDVLDKRRGRDPEMGGKPRRKNPQEGLYNELQKDKMAEAYSEIGMKGERRRGKGHDGLYQGLSTATKDTYDALHMQALPPR

SEQ ID NO: 215 - protein, 490 aa, Artificial Sequence
  source: /note="Description of Artificial Sequence: Synthetic polypeptide"
MALPVTALLLPLALLLHAARPEVQLVESGGGLVKPGGSLRLSCAASGFTFSSYSMNWVRQAPGKGLEWVSSISSSSSYIYYADSVKGRFTISRDNAKNSLYLQMNSLRAEDTAVYYCAKTIAAVYAFDIWGQGTTVTVSSGGGGSGGGGSGGGGSEIVLTQSPLSLPVTPEEPASISCRSSQSLLHSNGYNYLDWYLQKPGQSPQLLIYLGSNRASGVPDRFSGSGSGTDFTLKISRVEAEDVGVYYCMQALQTPYTFGQGTKLEIKTTTPAPRPPTPAPTIASQPLSLRPEACRPAAGGAVHTRGLDFACDIYIWAPLAGTCGVLLLSLVITLYCKRGRKKLLYIFKQPFMRPVQTTQEEDGCSCRFPEEEEGGCELRVKFSRSADAPAYKQGQNQLYNELNLGRREEYDVLDKRRGRDPEMGGKPRRKNPQEGLYNELQKDKMAEAYSEIGMKGERRRGKGHDGLYQGLSTATKDTYDALHMQALPPR

SEQ ID NO: 216 - protein, 484 aa, Artificial Sequence
  source: /note="Description of Artificial Sequence: Synthetic polypeptide"
MALPVTALLLPLALLLHAARPEVQLVESGGGLVKPGGSLRLSCAASGFTFSDYYMSWIRQAPGKGLEWVSYISSSGSTIYYADSVKGRFTISRDNAKNSLYLQMNSLRAEDTAVYYCARDLRGAFDIWGQGTMVTVSSGGGGSGGGGSGGGGSSYVLTQSPSVSAAPGYTATISCGGNNIGTKSVHWYQQKPGQAPLLVIRDDSVRPSKIPGRFSGSNSGNMATLTISGVQAGDEADFYCQVWDSDSEHVVFGGGTKLTVLTTTPAPRPPTPAPTIASQPLSLRPEACRPAAGGAVHTRGLDFACDIYIWAPLAGTCGVLLLSLVITLYCKRGRKKLLYIFKQPFMRPVQTTQEEDGCSCRFPEEEEGGCELRVKFSRSADAPAYKQGQNQLYNELNLGRREEYDVLDKRRGRDPEMGGKPRRKNPQEGLYNELQKDKMAEAYSEIGMKGERRRGKGHDGLYQGLSTATKDTYDALHMQALPPR

SEQ ID NO: 217 - protein, 485 aa, Artificial Sequence
  source: /note="Description of Artificial Sequence: Synthetic polypeptide"
MALPVTALLLPLALLLHAARPQVQLVQSGAEVKKPGASVKVSCKPSGYTVTSHYIHWVRRAPGQGLEWMGMINPSGGVTAYSQTLQGRVTMTSDTSSSTVYMELSSLRSEDTAMYYCAREGSGSGWYFDFWGRGTLVTVSSGGGGSGGGGSGGGGSSYVLTQPPSVSVSPGQTASITCSGDGLSKKYVSWYQQKAGQSPVVLISRDKERPSGIPDRFSGSNSADTATLTISGTQAMDEADYYCQAWDDTTVVFGGGTKLTVLTTTPAPRPPTPAPTIASQPLSLRPEACRPAAGGAVHTRGLDFACDIYIWAPLAGTCGVLLLSLVITLYCKRGRKKLLYIFKQPFMRPVQTTQEEDGCSCRFPEEEEGGCELRVKFSRSADAPAYKQGQNQLYNELNLGRREEYDVLDKRRGRDPEMGGKPRRKNPQEGLYNELQKDKMAEAYSEIGMKGERRRGKGHDGLYQGLSTATKDTYDALHMQALPPR

SEQ ID NO: 218 - protein, 489 aa, Artificial Sequence
  source: /note="Description of Artificial Sequence: Synthetic polypeptide"
MALPVTALLLPLALLLHAARPQVQLQESGPGLVKPSQTLSLTCTVSGGSISSGGYYWSWIRQHPGKGLEWIGYIYYSGSTYYNPSLKSRVTISVDTSKNQFSLKLSSVTAADTAVYYCARAGIAARLRGAFDIWGQGTMVTVSSGGGGSGGGGSGGGGSDIVMTQSPSSVSASVGDRVIITCRASQGIRNWLAWYQQKPGKAPNLLIYAASNLQSGVPSRFSGSGSGADFTLTISSLQPEDVATYYCQKYNSAPFTFGPGTKVDIKTTTPAPRPPTPAPTIASQPLSLRPEACRPAAGGAVHTRGLDFACDIYIWAPLAGTCGVLLLSLVITLYCKRGRKKLLYIFKQPFMRPVQTTQEEDGCSCRFPEEEEGGCELRVKFSRSADAPAYKQGQNQLYNELNLGRREEYDVLDKRRGRDPEMGGKPRRKNPQEGLYNELQKDKMAEAYSEIGMKGERRRGKGHDGLYQGLSTATKDTYDALHMQALPPR

SEQ ID NO: 219 - protein, 497 aa, Artificial Sequence
  source: /note="Description of Artificial Sequence: Synthetic polypeptide"
MALPVTALLLPLALLLHAARPQVQLVQSGAEVKKPGSSVKVSCKASGGTFSSYAISWVRQAPGQGLEWMGGIIPIFGTANYAQKFQGRVTITADESTSTAYMELSSLRSEDTAVYYCARRGGYQLLRWDVGLLRSAFDIWGQGTMVTVSSGGGGSGGGGSGGGGSSYVLTQPPSVSVAPGQTARITCGGNNIGSKSVHWYQQKPGQAPVLVLYGKNNRPSGVPDRFSGSRSGTTASLTITGAQAEDEADYYCSSRDSSGDHLRVFGTGTKVTVLTTTPAPRPPTPAPTIASQPLSLRPEACRPAAGGAVHTRGLDFACDIYIWAPLAGTCGVLLLSLVITLYCKRGRKKLLYIFKQPFMRPVQTTQEEDGCSCRFPEEEEGGCELRVKFSRSADAPAYKQGQNQLYNELNLGRREEYDVLDKRRGRDPEMGGKPRRKNPQEGLYNELQKDKMAEAYSEIGMKGERRRGKGHDGLYQGLSTATKDTYDALHMQALPPR

SEQ ID NO: 220 - protein, 492 aa, Artificial Sequence
  source: /note="Description of Artificial Sequence: Synthetic polypeptide"
MALPVTALLLPLALLLHAARPEVQLQQSGPGLVKPSQTLSLTCAISGDSVSSNSAAWNWIRQSPSRGLEWLGRTYYRSKWYSFYAISLKSRIIINPDTSKNQFSLQLKSVTPEDTAVYYCARSSPEGLFLYWFDPWGQGTLVTVSSGGDGSGGGGSGGGGSSSELTQDPAVSVALGQTIRITCQGDSLGNYYATWYQQKPGQAPVLVIYGTNNRPSGIPDRFSASSSGNTASLTITGAQAEDEADYYCNSRDSSGHHLLFGTGTKVTVLTTTPAPRPPTPAPTIASQPLSLRPEACRPAAGGAVHTRGLDFACDIYIWAPLAGTCGVLLLSLVITLYCKRGRKKLLYIFKQPFMRPVQTTQEEDGCSCRFPEEEEGGCELRVKFSRSADAPAYKQGQNQLYNELNLGRREEYDVLDKRRGRDPEMGGKPRRKNPQEGLYNELQKDKMAEAYSEIGMKGERRRGKGHDGLYQGLSTATKDTYDALHMQALPPR

SEQ ID NO: 221 - protein, 490 aa, Artificial Sequence
  source: /note="Description of Artificial Sequence: Synthetic polypeptide"
MALPVTALLLPLALLLHAARPEVQLVESGGGLVQPGGSLRLSCAASGFTFSSYAMSWVRQAPGKGLEWVSAISGSGGSTYYADSVKGRFTISRDNSKNTLYLQMNSLRAEDTAVYYCAKVEGSGSLDYWGQGTLVTVSSGGGGSGGGGSGGGGSEIVMTQSPGTLSLSPGERATLSCRASQSVSSAYLAWYQQKPGQPPRLLISGASTRATGIPDRFGGSGSGTDFTLTISRLEPEDFAVYYCQHYGSSFNGSSLFTFGQGTRLEIKTTTPAPRPPTPAPTIASQPLSLRPEACRPAAGGAVHTRGLDFACDIYIWAPLAGTCGVLLLSLVITLYCKRGRKKLLYIFKQPFMRPVQTTQEEDGCSCRFPEEEEGGCELRVKFSRSADAPAYKQGQNQLYNELNLGRREEYDVLDKRRGRDPEMGGKPRRKNPQEGLYNELQKDKMAEAYSEIGMKGERRRGKGHDGLYQGLSTATKDTYDALHMQALPPR

SEQ ID NO: 222 - protein, 485 aa, Artificial Sequence
  source: /note="Description of Artificial Sequence: Synthetic polypeptide"
MALPVTALLLPLALLLHAARPEVQLVETGGGLVQPGGSLRLSCAASGITFSRYPMSWVRQAPGKGLEWVSGISDSGVSTYYADSAKGRFTISRDNSKNTLFLQMSSLRDEDTAVYYCVTRAGSEASDIWGQGTMVTVSSGGGGSGGGGSGGGGSEIVLTQSPATLSLSPGERATLSCRASQSVSNSLAWYQQKPGQAPRLLIYDASSRATGIPDRFSGSGSGTDFTLTISRLEPEDFAIYYCQQFGTSSGLTFGGGTKLEIKTTTPAPRPPTPAPTIASQPLSLRPEACRPAAGGAVHTRGLDFACDIYIWAPLAGTCGVLLLSLVITLYCKRGRKKLLYIFKQPFMRPVQTTQEEDGCSCRFPEEEEGGCELRVKFSRSADAPAYKQGQNQLYNELNLGRREEYDVLDKRRGRDPEMGGKPRRKNPQEGLYNELQKDKMAEAYSEIGMKGERRRGKGHDGLYQGLSTATKDTYDALHMQALPPR

SEQ ID NO: 223 - protein, 492 aa, Artificial Sequence
  source: /note="Description of Artificial Sequence: Synthetic polypeptide"
MALPVTALLLPLALLLHAARPQVQLVESGGGLVQPGGSLRLSCAASGFTFSSYAMSWVRQAPGKGLEWVSAISGSGGSTYYADSVKGRFTISRDNAKNSLYLQMNSLRAEDTAIYYCARATYKRELRYYYGMDVWGQGTMVTVSSGGGGSGGGGSGGGGSEIVMTQSPGTVSLSPGERATLSCRASQSVSSSFLAWYQQKPGQAPRLLIYGASSRATGIPDRFSGSGSGTDFTLTISRLEPEDSAVYYCQQYHSSPSWTFGQGTRLEIKTTTPAPRPPTPAPTIASQPLSLRPEACRPAAGGAVHTRGLDFACDIYIWAPLAGTCGVLLLSLVITLYCKRGRKKLLYIFKQPFMRPVQTTQEEDGCSCRFPEEEEGGCELRVKFSRSADAPAYKQGQNQLYNELNLGRREEYDVLDKRRGRDPEMGGKPRRKNPQEGLYNELQKDKMAEAYSEIGMKGERRRGKGHDGLYQGLSTATKDTYDALHMQALPPR

SEQ ID NO: 224 - protein, 492 aa, Artificial Sequence
  source: /note="Description of Artificial Sequence: Synthetic polypeptide"
MALPVTALLLPLALLLHAARPEVQLVETGGGLVQPGGSLRLSCAASGFTFSSYAMSWVRQAPGKGLEWVSAISGSGGSTYYADSVKGRFTISRDNSKNTLYLQMNTLKAEDTAVYYCARATYKRELRYYYGMDVWGQGTTVTVSSGGGGSGGGGSGGGGSEIVLTQSPSTLSLSPGESATLSCRASQSVSTTFLAWYQQKPGQAPRLLIYGSSNRATGIPDRFSGSGSGTDFTLTIRRLEPEDFAVYYCQQYHSSPSWTFGQGTKVEIKTTTPAPRPPTPAPTIASQPLSLRPEACRPAAGGAVHTRGLDFACDIYIWAPLAGTCGVLLLSLVITLYCKRGRKKLLYIFKQPFMRPVQTTQEEDGCSCRFPEEEEGGCELRVKFSRSADAPAYKQGQNQLYNELNLGRREEYDVLDKRRGRDPEMGGKPRRKNPQEGLYNELQKDKMAEAYSEIGMKGERRRGKGHDGLYQGLSTATKDTYDALHMQALPPR

SEQ ID NO: 225 - protein, 483 aa, Artificial Sequence
  source: /note="Description of Artificial Sequence: Synthetic polypeptide"
MALPVTALLLPLALLLHAARPEVQLVETGGGLVQPGRSLRLSCAASGFTFDDYAMHWVRQAPGKGLEWVSGISWNSGSIGYADSVKGRFTISRDNAKNSLYLQMNSLRDEDTAVYYCARVGKAVPDVWGQGTTVTVSSGGGGSGGGGSGGGGSDIVMTQTPSSLSASVGDRVTITCRASQSISSYLNWYQQKPGKAPKLLIYAASSLQSGVPSRFSGSGSGTDFTLTISSLQPEDFATYYCQQSYSTPYSFGQGTRLEIKTTTPAPRPPTPAPTIASQPLSLRPEACRPAAGGAVHTRGLDFACDIYIWAPLAGTCGVLLLSLVITLYCKRGRKKLLYIFKQPFMRPVQTTQEEDGCSCRFPEEEEGGCELRVKFSRSADAPAYKQGQNQLYNELNLGRREEYDVLDKRRGRDPEMGGKPRRKNPQEGLYNELQKDKMAEAYSEIGMKGERRRGKGHDGLYQGLSTATKDTYDALHMQALPPR

SEQ ID NO: 226 - protein, 490 aa, Artificial Sequence
  source: /note="Description of Artificial Sequence: Synthetic polypeptide"
MALPVTALLLPLALLLHAARPEVQLVESGGGLVQPGRSLRLSCTASGFTFDDYAMHWVRQRPGKGLEWVASINWKGNSLAYGDSVKGRFAISRDNAKNTVFLQMNSLRTEDTAVYYCASHQGVAYYNYAMDVWGRGTLVTVSSGGGGSGGGGSGGGGSEIVLTQSPGTLSLSPGERATLSCRATQSIGSSFLAWYQQRPGQAPRLLIYGASQRATGIPDRFSGRGSGTDFTLTISRVEPEDSAVYYCQHYESSPSWTFGQGTKVEIKTTTPAPRPPTPAPTIASQPLSLRPEACRPAAGGAVHTRGLDFACDIYIWAPLAGTCGVLLLSLVITLYCKRGRKKLLYIFKQPFMRPVQTTQEEDGCSCRFPEEEEGGCELRVKFSRSADAPAYKQGQNQLYNELNLGRREEYDVLDKRRGRDPEMGGKPRRKNPQEGLYNELQKDKMAEAYSEIGMKGERRRGKGHDGLYQGLSTATKDTYDALHMQALPPR

SEQ ID NO: 227 - protein, 485 aa, Artificial Sequence
  source: /note="Description of Artificial Sequence: Synthetic polypeptide"
MALPVTALLLPLALLLHAARPEVQLVESGGGLVQPGGSLRLSCAASGFTFSSYAMSWVRQAPGKGLEWVSAISGSGGSTYYADSVKGRFTISRDNSKNTLYLQMNSLRAEDTAVYYCAKVVRDGMDVWGQGTTVTVSSGGGGSGGGGSGGGGSEIVLTQSPATLSLSPGERATLSCRASQSVSSSYLAWYQQKPGQAPRLLIYGASSRATGIPDRFSGNGSGTDFTLTISRLEPEDFAVYYCQQYGSPPRFTFGPGTKVDIKTTTPAPRPPTPAPTIASQPLSLRPEACRPAAGGAVHTRGLDFACDIYIWAPLAGTCGVLLLSLVITLYCKRGRKKLLYIFKQPFMRPVQTTQEEDGCSCRFPEEEEGGCELRVKFSRSADAPAYKQGQNQLYNELNLGRREEYDVLDKRRGRDPEMGGKPRRKNPQEGLYNELQKDKMAEAYSEIGMKGERRRGKGHDGLYQGLSTATKDTYDALHMQALPPR

SEQ ID NO: 228 - protein, 486 aa, Artificial Sequence
  source: /note="Description of Artificial Sequence: Synthetic polypeptide"
MALPVTALLLPLALLLHAARPEVQLLESGGGLVQPGGSLRLSCAASGFTFSSYAMSWVRQAPGKGLEWVSAISGSGGSTYYADSVKGRFTISRDNSKNTLYLQMNSLRAEDTAVYYCAKIPQTGTFDYWGQGTLVTVSSGGGGSGGGGSGGGGSEIVLTQSPGTLSLSPGERATLSCRASQSVSSSYLAWYQQRPGQAPRLLIYGASSRATGIPDRFSGSGSGTDFTLTISRLEPEDFAVYYCQHYGSSPSWTFGQGTRLEIKTTTPAPRPPTPAPTIASQPLSLRPEACRPAAGGAVHTRGLDFACDIYIWAPLAGTCGVLLLSLVITLYCKRGRKKLLYIFKQPFMRPVQTTQEEDGCSCRFPEEEEGGCELRVKFSRSADAPAYKQGQNQLYNELNLGRREEYDVLDKRRGRDPEMGGKPRRKNPQEGLYNELQKDKMAEAYSEIGMKGERRRGKGHDGLYQGLSTATKDTYDALHMQALPPR

SEQ ID NO: 229 - protein, 492 aa, Artificial Sequence
  source: /note="Description of Artificial Sequence: Synthetic polypeptide"
MALPVTALLLPLALLLHAARPEVQLVETGGGLVQPGGSLRLSCAASGFTFSSYAMSWVRQAPGKGLEWVSAISGSGGSTYYADSVKGRFTMSRENDKNSVFLQMNSLRVEDTGVYYCARANYKRELRYYYGMDVWGQGTMVTVSSGGGGSGGGGSGGGGSEIVMTQSPGTLSLSPGESATLSCRASQRVASNYLAWYQHKPGQAPSLLISGASSRATGVPDRFSGSGSGTDFTLAISRLEPEDSAVYYCQHYDSSPSWTFGQGTKVEIKTTTPAPRPPTPAPTIASQPLSLRPEACRPAAGGAVHTRGLDFACDIYIWAPLAGTCGVLLLSLVITLYCKRGRKKLLYIFKQPFMRPVQTTQEEDGCSCRFPEEEEGGCELRVKFSRSADAPAYKQGQNQLYNELNLGRREEYDVLDKRRGRDPEMGGKPRRKNPQEGLYNELQKDKMAEAYSEIGMKGERRRGKGHDGLYQGLSTATKDTYDALHMQALPPR

SEQ ID NO: 230 - protein, 488 aa, Artificial Sequence
  source: /note="Description of Artificial Sequence: Synthetic polypeptide"
MALPVTALLLPLALLLHAARPEVQLLETGGGLVQPGGSLRLSCAASGFSFSSYAMSWVRQAPGKGLEWVSAISGSGGSTYYADSVKGRFTISRDNSKNTLYLQMNSLRAEDTAVYYCAKALVGATGAFDIWGQGTLVTVSSGGGGSGGGGSGGGGSEIVLTQSPGTLSLSPGERATLSCRASQSLSSNFLAWYQQKPGQAPGLLIYGASNWATGTPDRFSGSGSGTDFTLTITRLEPEDFAVYYCQYYGTSPMYTFGQGTKVEIKTTTPAPRPPTPAPTIASQPLSLRPEACRPAAGGAVHTRGLDFACDIYIWAPLAGTCGVLLLSLVITLYCKRGRKKLLYIFKQPFMRPVQTTQEEDGCSCRFPEEEEGGCELRVKFSRSADAPAYKQGQNQLYNELNLGRREEYDVLDKRRGRDPEMGGKPRRKNPQEGLYNELQKDKMAEAYSEIGMKGERRRGKGHDGLYQGLSTATKDTYDALHMQALPPR

SEQ ID NO: 231 - protein, 488 aa, Artificial Sequence
  source: /note="Description of Artificial Sequence: Synthetic polypeptide"
MALPVTALLLPLALLLHAARPEVQLLESGGGLVQPGGSLRLSCAASGFTFSSYAMSWVRQAPGKGLEWVSAISGSGGSTYYADSVKGRFTISRDNSKNTLYLQMNSLRAEDTAVYYCVLWFGEGFDPWGQGTLVTVSSGGGGSGGGGSGGGGSDIVLTQSPLSLPVTPGEPASISCRSSQSLLHSNGYNYLDWYLQKPGQSPQLLIYLGSNRASGVPDRFSGSGSGTDFTLKISRVEAEDVGVYYCMQALQTPLTFGGGTKVDIKTTTPAPRPPTPAPTIASQPLSLRPEACRPAAGGAVHTRGLDFACDIYIWAPLAGTCGVLLLSLVITLYCKRGRKKLLYIFKQPFMRPVQTTQEEDGCSCRFPEEEEGGCELRVKFSRSADAPAYKQGQNQLYNELNLGRREEYDVLDKRRGRDPEMGGKPRRKNPQEGLYNELQKDKMAEAYSEIGMKGERRRGKGHDGLYQGLSTATKDTYDALHMQALPPR

SEQ ID NO: 232 - protein, 495 aa, Artificial Sequence
  source: /note="Description of Artificial Sequence: Synthetic polypeptide"
MALPVTALLLPLALLLHAARPQVQLVESGGGLVQPGGSLRLSCAASGFTFSSYAMSWVRQAPGKGLEWVSAISGSGGSTYYADSVKGRFTISRDNSKNTLYLQMNSLRAEDTAVYYCAKVGYDSSGYYRDYYGMDVWGQGTTVTVSSGGGGSGGGGSGGGGSEIVLTQSPGTLSLSPGERATLSCRASQSVSSSYLAWYQQKPGQAPRLLIYGTSSRATGISDRFSGSGSGTDFTLTISRLEPEDFAVYYCQHYGNSPPKFTFGPGTKLEIKTTTPAPRPPTPAPTIASQPLSLRPEACRPAAGGAVHTRGLDFACDIYIWAPLAGTCGVLLLSLVITLYCKRGRKKLLYIFKQPFMRPVQTTQEEDGCSCRFPEEEEGGCELRVKFSRSADAPAYKQGQNQLYNELNLGRREEYDVLDKRRGRDPEMGGKPRRKNPQEGLYNELQKDKMAEAYSEIGMKGERRRGKGHDGLYQGLSTATKDTYDALHMQALPPR

SEQ ID NO: 233 - protein, 490 aa, Artificial Sequence
  source: /note="Description of Artificial Sequence: Synthetic polypeptide"
MALPVTALLLPLALLLHAARPEVQLVESGGGLVQPGGSLRLSCAASGFTFSSYAMSWVRQAPGKGLEWVSAISGSGGSTYYADSVKGRFTISRDNSKNTLYLQMNSLRAEDTAVYYCAKMGWSSGYLGAFDIWGQGTTVTVSSGGGGSGGGGSGGGGSEIVLTQSPGTLSLSPGERATLSCRASQSVASSFLAWYQQKPGQAPRLLIYGASGRATGIPDRFSGSGSGTDFTLTISRLEPEDFAVYYCQHYGGSPRLTFGGGTKVDIKTTTPAPRPPTPAPTIASQPLSLRPEACRPAAGGAVHTRGLDFACDIYIWAPLAGTCGVLLLSLVITLYCKRGRKKLLYIFKQPFMRPVQTTQEEDGCSCRFPEEEEGGCELRVKFSRSADAPAYKQGQNQLYNELNLGRREEYDVLDKRRGRDPEMGGKPRRKNPQEGLYNELQKDKMAEAYSEIGMKGERRRGKGHDGLYQGLSTATKDTYDALHMQALPPR

SEQ ID NO: 234 - DNA, 1461 bp, Artificial Sequence
  source: /note="Description of Artificial Sequence: Synthetic polynucleotide"
atggccctccctgtcaccgccctgctgcttccgctggctcttctgctccacgccgctcggccccaagtgcagcttcaggaaagcggaccgggcctggtcaagccatccgaaactctctccctgacttgcactgtgtctggcggttccatctcatcgtcgtactactactggggctggattaggcagccgcccggaaagggactggagtggatcggaagcatctactattccggctcggcgtactacaaccctagcctcaagtcgagagtgaccatctccgtggatacctccaagaaccagttttccctgcgcctgagctccgtgaccgccgctgacaccgccgtgtactactgtgctcggcattggcaggaatggcccgatgccttcgacatttggggccagggcactatggtcactgtgtcatccgggggtggaggcagcgggggaggagggtccggggggggaggttcagagacaaccttgacccagtcacccgcattcatgtccgccactccgggagacaaggtcatcatctcgtgcaaagcgtcccaggatatcgacgatgccatgaattggtaccagcagaagcctggcgaagcgccgctgttcattatccaatccgcaacctcgcccgtgcctggaatcccaccgcggttcagcggcagcggtttcggaaccgacttttccctgaccattaacaacattgagtccgaggacgccgcctactacttctgcctgcaacacgacaacttccctctcacgttcggccagggaaccaagctggaaatcaagaccactaccccagcaccgaggccacccaccccggctcctaccatcgcctcccagcctctgtccctgcgtccggaggcatgtagacccgcagctggtggggccgtgcatacccggggtcttgacttcgcctgcgatatctacatttgggcccctctggctggtacttgcggggtcctgctgctttcactcgtgatcactctttactgtaagcgcggtcggaagaagctgctgtacatctttaagcaacccttcatgaggcctgtgcagactactcaagaggaggacggctgttcatgccggttcccagaggaggaggaaggcggctgcgaactgcgcgtgaaattcagccgcagcgcagatgctccagcctacaagcaggggcagaaccagctctacaacgaactcaatcttggtcggagagaggagtacgacgtgctggacaagcggagaggacgggacccagaaatgggcgggaagccgcgcagaaagaatccccaagagggcctgtacaacgagctccaaaaggataagatggcagaagcctatagcgagattggtatgaaaggggaacgcagaagaggcaaaggccacgacggactgtaccagggactcagcaccgccaccaaggacacctatgacgctcttcacatgcaggccctgccgcctcgg

SEQ ID NO: 235 - DNA, 1467 bp, Artificial Sequence
  source: /note="Description of Artificial Sequence: Synthetic polynucleotide"
atggccctccctgtcaccgccctgctgcttccgctggctcttctgctccacgccgctcggccccaagtcaatctgcgcgaatccggccccgccttggtcaagcctacccagaccctcactctgacctgtactttctccggcttctccctgcggacttccgggatgtgcgtgtcctggatcagacagcctccgggaaaggccctggagtggctcgctcgcattgactgggatgaggacaagttctactccacctcactcaagaccaggctgaccatcagcaaagatacctctgacaaccaagtggtgctccgcatgaccaacatggacccagccgacactgccacttactactgcgcgaggagcggagcgggcggaacctccgccaccgccttcgatatttggggcccgggtaccatggtcaccgtgtcaagcggaggaggggggtccgggggcggcggttccgggggaggcggatcggacattcagatgactcagtcaccatcgtccctgagcgctagcgtgggcgacagagtgacaatcacttgccgggcatcccaggacatctataacaaccttgcgtggttccagctgaagcctggttccgcaccgcggtcacttatgtacgccgccaacaagagccagtcgggagtgccgtcccggttttccggttcggcctcgggaactgacttcaccctgacgatctccagcctgcaacccgaggatttcgccacctactactgccagcactactaccgctttccctactcgttcggacagggaaccaagctggaaatcaagaccactaccccagcaccgaggccacccaccccggctcctaccatcgcctcccagcctctgtccctgcgtccggaggcatgtagacccgcagctggtggggccgtgcatacccggggtcttgacttcgcctgcgatatctacatttgggcccctctggctggtacttgcggggtcctgctgctttcactcgtgatcactctttactgtaagcgcggtcggaagaagctgctgtacatctttaagcaacccttcatgaggcctgtgcagactactcaagaggaggacggctgttcatgccggttcccagaggaggaggaaggcggctgcgaactgcgcgtgaaattcagccgcagcgcagatgctccagcctacaagcaggggcagaaccagctctacaacgaactcaatcttggtcggagagaggagtacgacgtgctggacaagcggagaggacgggacccagaaatgggcgggaagccgcgcagaaagaatccccaagagggcctgtacaacgagctccaaaaggataagatggcagaagcctatagcgagattggtatgaaaggggaacgcagaagaggcaaaggccacgacggactgtaccagggactcagcaccgccaccaaggacacctatgacgctcttcacatgcaggccctgccgcctcgg

SEQ ID NO: 236 - DNA, 1470 bp, Artificial Sequence
  source: /note="Description of Artificial Sequence: Synthetic polynucleotide"
atggccctccctgtcaccgccctgctgcttccgctggctcttctgctccacgccgctcggcccgaagtgcagcttgtcgaatccggggggggactggtcaagccgggcggatcactgagactgtcctgcgccgcgagcggcttcacgttctcctcctactccatgaactgggtccgccaagcccccgggaagggactggaatgggtgtcctctatctcctcgtcgtcgtcctacatctactacgccgactccgtgaagggaagattcaccatttcccgcgacaacgcaaagaactcactgtacttgcaaatgaactcactccgggccgaagatactgctgtgtactattgcgccaagactattgccgccgtctacgctttcgacatctggggccagggaaccaccgtgactgtgtcgtccggtggtggtggctcgggcggaggaggaagcggcggcggggggtccgagattgtgctgacccagtcgccactgagcctccctgtgacccccgaggaacccgccagcatcagctgccggtccagccagtccctgctccactccaacggatacaattacctcgattggtaccttcagaagcctggacaaagcccgcagctgctcatctacttgggatcaaaccgcgcgtcaggagtgcctgaccggttctccggctcgggcagcggtaccgatttcaccctgaaaatctccagggtggaggcagaggacgtgggagtgtattactgtatgcaggcgctgcagactccgtacacatttgggcagggcaccaagctggagatcaagaccactaccccagcaccgaggccacccaccccggctcctaccatcgcctcccagcctctgtccctgcgtccggaggcatgtagacccgcagctggtggggccgtgcatacccggggtcttgacttcgcctgcgatatctacatttgggcccctctggctggtacttgcggggtcctgctgctttcactcgtgatcactctttactgtaagcgcggtcggaagaagctgctgtacatctttaagcaacccttcatgaggcctgtgcagactactcaagaggaggacggctgttcatgccggttcccagaggaggaggaaggcggctgcgaactgcgcgtgaaattcagccgcagcgcagatgctccagcctacaagcaggggcagaaccagctctacaacgaactcaatcttggtcggagagaggagtacgacgtgctggacaagcggagaggacgggacccagaaatgggcgggaagccgcgcagaaagaatccccaagagggcctgtacaacgagctccaaaaggataagatggcagaagcctatagcgagattggtatgaaaggggaacgcagaagaggcaaaggccacgacggactgtaccagggactcagcaccgccaccaaggacacctatgacgctcttcacatgcaggccctgccgcctcgg

SEQ ID NO: 237 - DNA, 1452 bp, Artificial Sequence
  source: /note="Description of Artificial Sequence: Synthetic polynucleotide"
atggccctccctgtcaccgccctgctgcttccgctggctcttctgctccacgccgctcggcccgaagtccagctcgtggagtccggcggaggccttgtgaagcctggaggttcgctgagactgtcctgcgccgcctccggcttcaccttctccgactactacatgtcctggatcagacaggccccgggaaagggcctggaatgggtgtcctacatctcgtcatcgggcagcactatctactacgcggactcagtgaaggggcggttcaccatttcccgggataacgcgaagaactcgctgtatctgcaaatgaactcactgagggccgaggacaccgccgtgtactactgcgcccgcgatctccgcggggcatttgacatctggggacagggaaccatggtcacagtgtccagcggagggggaggatcgggtggcggaggttccgggggtggaggctcctcctacgtgctgactcagagcccaagcgtcagcgctgcgcccggttacacggcaaccatctcctgtggcggaaacaacattgggaccaagtctgtgcactggtatcagcagaagccgggccaagctcccctgttggtgatccgcgatgactccgtgcggcctagcaaaattccgggacggttctccggctccaacagcggcaatatggccactctcaccatctcgggagtgcaggccggagatgaagccgacttctactgccaagtctgggactcagactccgagcatgtggtgttcgggggcggaaccaagctgactgtgctcaccactaccccagcaccgaggccacccaccccggctcctaccatcgcctcccagcctctgtccctgcgtccggaggcatgtagacccgcagctggtggggccgtgcatacccggggtcttgacttcgcctgcgatatctacatttgggcccctctggctggtacttgcggggtcctgctgctttcactcgtgatcactctttactgtaagcgcggtcggaagaagctgctgtacatctttaagcaacccttcatgaggcctgtgcagactactcaagaggaggacggctgttcatgccggttcccagaggaggaggaaggcggctgcgaactgcgcgtgaaattcagccgcagcgcagatgctccagcctacaagcaggggcagaaccagctctacaacgaactcaatcttggtcggagagaggagtacgacgtgctggacaagcggagaggacgggacccagaaatgggcgggaagccgcgcagaaagaatccccaagagggcctgtacaacgagctccaaaaggataagatggcagaagcctatagcgagattggtatgaaaggggaacgcagaagaggcaaaggccacgacggactgtaccagggactcagcaccgccaccaaggacacctatgacgctcttcacatgcaggccctgccgcctcgg

SEQ ID NO: 238 - DNA, 1455 bp, Artificial Sequence
  source: /note="Description of Artificial Sequence: Synthetic polynucleotide"
atggccctccctgtcaccgccctgctgcttccgctggctcttctgctccacgccgctcggccccaagtgcagctggtgcagagcggggccgaagtcaagaagccgggagcctccgtgaaagtgtcctgcaagccttcgggatacaccgtgacctcccactacattcattgggtccgccgcgcccccggccaaggactcgagtggatgggcatgatcaaccctagcggcggagtgaccgcgtacagccagacgctgcagggacgcgtgactatgacctcggatacctcctcctccaccgtctatatggaactgtccagcctgcggtccgaggataccgccatgtactactgcgcccgggaaggatcaggctccgggtggtatttcgacttctggggaagaggcaccctcgtgactgtgtcatctgggggagggggttccggtggtggcggatcgggaggaggcggttcatcctacgtgctgacccagccaccctccgtgtccgtgagccccggccagactgcatcgattacatgtagcggcgacggcctctccaagaaatacgtgtcgtggtaccagcagaaggccggacagagcccggtggtgctgatctcaagagataaggagcggcctagcggaatcccggacaggttctcgggttccaactccgcggacactgctactctgaccatctcggggacccaggctatggacgaagccgattactactgccaagcctgggacgacactactgtcgtgtttggagggggcaccaagttgaccgtccttaccactaccccagcaccgaggccacccaccccggctcctaccatcgcctcccagcctctgtccctgcgtccggaggcatgtagacccgcagctggtggggccgtgcatacccggggtcttgacttcgcctgcgatatctacatttgggcccctctggctggtacttgcggggtcctgctgctttcactcgtgatcactctttactgtaagcgcggtcggaagaagctgctgtacatctttaagcaacccttcatgaggcctgtgcagactactcaagaggaggacggctgttcatgccggttcccagaggaggaggaaggcggctgcgaactgcgcgtgaaattcagccgcagcgcagatgctccagcctacaagcaggggcagaaccagctctacaacgaactcaatcttggtcggagagaggagtacgacgtgctggacaagcggagaggacgggacccagaaatgggcgggaagccgcgcagaaagaatccccaagagggcctgtacaacgagctccaaaaggataagatggcagaagcctatagcgagattggtatgaaaggggaacgcagaagaggcaaaggccacgacggactgtaccagggactcagcaccgccaccaaggacacctatgacgctcttcacatgcaggccctgccgcctcgg

SEQ ID NO: 239 - DNA, 1467 bp, Artificial Sequence
  source: /note="Description of Artificial Sequence: Synthetic polynucleotide"
atggccctccctgtcaccgccctgctgcttccgctggctcttctgctccacgccgctcggccccaagtgcagcttcaggagagcggcccgggactcgtgaagccgtcccagaccctgtccctgacttgcaccgtgtcgggaggaagcatctcgagcggaggctactattggtcgtggattcggcagcaccctggaaagggcctggaatggatcggctacatctactactccggctcgacctactacaacccatcgctgaagtccagagtgacaatctcagtggacacgtccaagaatcagttcagcctgaagctctcttccgtgactgcggccgacaccgccgtgtactactgcgcacgcgctggaattgccgcccggctgaggggtgccttcgacatttggggacagggcaccatggtcaccgtgtcctccggcggcggaggttccgggggtggaggctcaggaggaggggggtccgacatcgtcatgactcagtcgccctcaagcgtcagcgcgtccgtcggggacagagtgatcatcacctgtcgggcgtcccagggaattcgcaactggctggcctggtatcagcagaagcccggaaaggcccccaacctgttgatctacgccgcctcaaacctccaatccggggtgccgagccgcttcagcggctccggttcgggtgccgatttcactctgaccatctcctccctgcaacctgaagatgtggctacctactactgccaaaagtacaactccgcaccttttactttcggaccggggaccaaagtggacattaagaccactaccccagcaccgaggccacccaccccggctcctaccatcgcctcccagcctctgtccctgcgtccggaggcatgtagacccgcagctggtggggccgtgcatacccggggtcttgacttcgcctgcgatatctacatttgggcccctctggctggtacttgcggggtcctgctgctttcactcgtgatcactctttactgtaagcgcggtcggaagaagctgctgtacatctttaagcaacccttcatgaggcctgtgcagactactcaagaggaggacggctgttcatgccggttcccagaggaggaggaaggcggctgcgaactgcgcgtgaaattcagccgcagcgcagatgctccagcctacaagcaggggcagaaccagctctacaacgaactcaatcttggtcggagagaggagtacgacgtgctggacaagcggagaggacgggacccagaaatgggcgggaagccgcgcagaaagaatccccaagagggcctgtacaacgagctccaaaaggataagatggcagaagcctatagcgagattggtatgaaaggggaacgcagaagaggcaaaggccacgacggactgtaccagggactcagcaccgccaccaaggacacctatgacgctcttcacatgcaggccctgccgcctcgg

SEQ ID NO: 240 - DNA, 1491 bp, Artificial Sequence
  source: /note="Description of Artificial Sequence: Synthetic polynucleotide"
atggccctccctgtcaccgccctgctgcttccgctggctcttctgctccacgccgctcggccccaagtgcagctggtccagtcgggcgccgaggtcaagaagcccgggagctctgtgaaagtgtcctgcaaggcctccgggggcacctttagctcctacgccatctcctgggtccgccaagcaccgggtcaaggcctggagtggatggggggaattatccctatcttcggcactgccaactacgcccagaagttccagggacgcgtgaccattaccgcggacgaatccacctccaccgcttatatggagctgtccagcttgcgctcggaagataccgccgtgtactactgcgcccggaggggtggataccagctgctgagatgggacgtgggcctcctgcggtcggcgttcgacatctggggccagggcactatggtcactgtgtccagcggaggaggcggatcgggaggcggcggatcagggggaggcggttccagctacgtgcttactcaacccccttcggtgtccgtggccccgggacagaccgccagaatcacttgcggaggaaacaacattgggtccaagagcgtgcattggtaccagcagaagccaggacaggcccctgtgctggtgctctacgggaagaacaatcggcccagcggagtgccggacaggttctcgggttcacgctccggtacaaccgcttcactgactatcaccggggcccaggcagaggatgaagcggactactactgttcctcccgggattcatccggcgaccacctccgggtgttcggaaccggaacgaaggtcaccgtgctgaccactaccccagcaccgaggccacccaccccggctcctaccatcgcctcccagcctctgtccctgcgtccggaggcatgtagacccgcagctggtggggccgtgcatacccggggtcttgacttcgcctgcgatatctacatttgggcccctctggctggtacttgcggggtcctgctgctttcactcgtgatcactctttactgtaagcgcggtcggaagaagctgctgtacatctttaagcaacccttcatgaggcctgtgcagactactcaagaggaggacggctgttcatgccggttcccagaggaggaggaaggcggctgcgaactgcgcgtgaaattcagccgcagcgcagatgctccagcctacaagcaggggcagaaccagctctacaacgaactcaatcttggtcggagagaggagtacgacgtgctggacaagcggagaggacgggacccagaaatgggcgggaagccgcgcagaaagaatccccaagagggcctgtacaacgagctccaaaaggataagatggcagaagcctatagcgagattggtatgaaaggggaacgcagaagaggcaaaggccacgacggactgtaccagggactcagcaccgccaccaaggacacctatgacgctcttcacatgcaggccctgccgcctcgg

SEQ ID NO: 241 - DNA, 1476 bp, Artificial Sequence
  source: /note="Description of Artificial Sequence: Synthetic polynucleotide"
atggccctccctgtcaccgccctgctgcttccgctggctcttctgctccacgccgctcggcccgaagtgcagctccaacagtcaggaccggggctcgtgaagccatcccagaccctgtccctgacttgtgccatctcgggagatagcgtgtcatcgaactccgccgcctggaactggattcggcagagcccgtcccgcggactggagtggcttggaaggacctactaccggtccaagtggtactctttctacgcgatctcgctgaagtcccgcattatcattaaccctgatacctccaagaatcagttctccctccaactgaaatccgtcacccccgaggacacagcagtgtattactgcgcacggagcagccccgaaggactgttcctgtattggtttgacccctggggccaggggactcttgtgaccgtgtcgagcggcggagatgggtccggtggcggtggttcggggggcggcggatcatcatccgaactgacccaggacccggctgtgtccgtggcgctgggacaaaccatccgcattacgtgccagggagactccctgggcaactactacgccacttggtaccagcagaagccgggccaagcccctgtgttggtcatctacgggaccaacaacagaccttccggcatccccgaccggttcagcgcttcgtcctccggcaacactgccagcctgaccatcactggagcgcaggccgaagatgaggccgactactactgcaacagcagagactcctcgggtcatcacctcttgttcggaactggaaccaaggtcaccgtgctgaccactaccccagcaccgaggccacccaccccggctcctaccatcgcctcccagcctctgtccctgcgtccggaggcatgtagacccgcagctggtggggccgtgcatacccggggtcttgacttcgcctgcgatatctacatttgggcccctctggctggtacttgcggggtcctgctgctttcactcgtgatcactctttactgtaagcgcggtcggaagaagctgctgtacatctttaagcaacccttcatgaggcctgtgcagactactcaagaggaggacggctgttcatgccggttcccagaggaggaggaaggcggctgcgaactgcgcgtgaaattcagccgcagcgcagatgctccagcctacaagcaggggcagaaccagctctacaacgaactcaatcttggtcggagagaggagtacgacgtgctggacaagcggagaggacgggacccagaaatgggcgggaagccgcgcagaaagaatccccaagagggcctgtacaacgagctccaaaaggataagatggcagaagcctatagcgagattggtatgaaaggggaacgcagaagaggcaaaggccacgacggactgtaccagggactcagcaccgccaccaaggacacctatgacgctcttcacatgcaggccctgccgcctcgg

SEQ ID NO: 242 - DNA, 1470 bp, Artificial Sequence
  source: /note="Description of Artificial Sequence: Synthetic polynucleotide"
atggccctccctgtcaccgccctgctgcttccgctggctcttctgctccacgccgctcggcccgaagtgcagctcgtggagtcaggaggcggcctggtccagccgggagggtcccttagactgtcatgcgccgcaagcggattcactttctcctcctatgccatgagctgggtccgccaagcccccggaaagggactggaatgggtgtccgccatctcggggtctggaggctcaacttactacgctgactccgtgaagggacggttcaccattagccgcgacaactccaagaacaccctctacctccaaatgaactccctgcgggccgaggataccgccgtctactactgcgccaaagtggaaggttcaggatcgctggactactggggacagggtactctcgtgaccgtgtcatcgggcggaggaggttccggcggtggcggctccggcggcggagggtcggagatcgtgatgacccagagccctggtactctgagcctttcgccgggagaaagggccaccctgtcctgccgcgcttcccaatccgtgtcctccgcgtacttggcgtggtaccagcagaagccgggacagccccctcggctgctgatcagcggggccagcacccgggcaaccggaatcccagacagattcgggggttccggcagcggcacagatttcaccctgactatttcgaggttggagcccgaggactttgcggtgtattactgtcagcactacgggtcgtcctttaatggctccagcctgttcacgttcggacaggggacccgcctggaaatcaagaccactaccccagcaccgaggccacccaccccggctcctaccatcgcctcccagcctctgtccctgcgtccggaggcatgtagacccgcagctggtggggccgtgcatacccggggtcttgacttcgcctgcgatatctacatttgggcccctctggctggtacttgcggggtcctgctgctttcactcgtgatcactctttactgtaagcgcggtcggaagaagctgctgtacatctttaagcaacccttcatgaggcctgtgcagactactcaagaggaggacggctgttcatgccggttcccagaggaggaggaaggcggctgcgaactgcgcgtgaaattcagccgcagcgcagatgctccagcctacaagcaggggcagaaccagctctacaacgaactcaatcttggtcggagagaggagtacgacgtgctggacaagcggagaggacgggacccagaaatgggcgggaagccgcgcagaaagaatccccaagagggcctgtacaacgagctccaaaaggataagatggcagaagcctatagcgagattggtatgaaaggggaacgcagaagaggcaaaggccacgacggactgtaccagggactcagcaccgccaccaaggacacctatgacgctcttcacatgcaggccctgccgcctcgg

SEQ ID NO: 243 - DNA, 1455 bp, Artificial Sequence
  source: /note="Description of Artificial Sequence: Synthetic polynucleotide"
atggccctccctgtcaccgccctgctgcttccgctggctcttctgctccacgccgctcggcccgaagtgcaactggtggaaaccggtggcggcctggtgcagcctggaggatcattgaggctgtcatgcgcggccagcggtattaccttctcccggtaccccatgtcctgggtcagacaggccccggggaaagggcttgaatgggtgtccgggatctcggactccggtgtcagcacttactacgccgactccgccaagggacgcttcaccatttcccgggacaactcgaagaacaccctgttcctccaaatgagctccctccgggacgaggatactgcagtgtactactgcgtgacccgcgccgggtccgaggcgtctgacatttggggacagggcactatggtcaccgtgtcgtccggcggagggggctcgggaggcggtggcagcggaggaggagggtccgagatcgtgctgacccaatccccggccaccctctcgctgagccctggagaaagggcaaccttgtcctgtcgcgcgagccagtccgtgagcaactccctggcctggtaccagcagaagcccggacaggctccgagacttctgatctacgacgcttcgagccgggccactggaatccccgaccgcttttcggggtccggctcaggaaccgatttcaccctgacaatctcacggctggagccagaggatttcgccatctattactgccagcagttcggtacttcctccggcctgactttcggaggcggcacgaagctcgaaatcaagaccactaccccagcaccgaggccacccaccccggctcctaccatcgcctcccagcctctgtccctgcgtccggaggcatgtagacccgcagctggtggggccgtgcatacccggggtcttgacttcgcctgcgatatctacatttgggcccctctggctggtacttgcggggtcctgctgctttcactcgtgatcactctttactgtaagcgcggtcggaagaagctgctgtacatctttaagcaacccttcatgaggcctgtgcagactactcaagaggaggacggctgttcatgccggttcccagaggaggaggaaggcggctgcgaactgcgcgtgaaattcagccgcagcgcagatgctccagcctacaagcaggggcagaaccagctctacaacgaactcaatcttggtcggagagaggagtacgacgtgctggacaagcggagaggacgggacccagaaatgggcgggaagccgcgcagaaagaatccccaagagggcctgtacaacgagctccaaaaggataagatggcagaagcctatagcgagattggtatgaaaggggaacgcagaagaggcaaaggccacgacggactgtaccagggactcagcaccgccaccaaggacacctatgacgctcttcacatgcaggccctgccgcctcgg

SEQ ID NO: 244 - DNA, 1476 bp, Artificial Sequence
  source: /note="Description of Artificial Sequence: Synthetic polynucleotide"
atggccctccctgtcaccgccctgctgcttccgctggctcttctgctccacgccgctcggccccaagtgcagctcgtggaatcgggtggcggactggtgcagccggggggctcacttagactgtcctgcgcggccagcggattcactttctcctcctacgccatgtcctgggtcagacaggcccctggaaagggcctggaatgggtgtccgcaatcagcggcagcggcggctcgacctattacgcggattcagtgaagggcagattcaccatttcccgggacaacgccaagaactccttgtaccttcaaatgaactccctccgcgcggaagataccgcaatctactactgcgctcgggccacttacaagagggaactgcgctactactacgggatggacgtctggggccagggaaccatggtcaccgtgtccagcggaggaggaggatcgggaggaggcggtagcgggggtggagggtcggagatcgtgatgacccagtcccccggcactgtgtcgctgtcccccggcgaacgggccaccctgtcatgtcgggccagccagtcagtgtcgtcaagcttcctcgcctggtaccagcagaaaccgggacaagctccccgcctgctgatctacggagccagcagccgggccaccggtattcctgaccggttctccggttcggggtccgggaccgactttactctgactatctctcgcctcgagccagaggactccgccgtgtattactgccagcagtaccactcctccccgtcctggacgttcggacagggcacaaggctggagattaagaccactaccccagcaccgaggccacccaccccggctcctaccatcgcctcccagcctctgtccctgcgtccggaggcatgtagacccgcagctggtggggccgtgcatacccggggtcttgacttcgcctgcgatatctacatttgggcccctctggctggtacttgcggggtcctgctgctttcactcgtgatcactctttactgtaagcgcggtcggaagaagctgctgtacatctttaagcaacccttcatgaggcctgtgcagactactcaagaggaggacggctgttcatgccggttcccagaggaggaggaaggcggctgcgaactgcgcgtgaaattcagccgcagcgcagatgctccagcctacaagcaggggcagaaccagctctacaacgaactcaatcttggtcggagagaggagtacgacgtgctggacaagcggagaggacgggacccagaaatgggcgggaagccgcgcagaaagaatccccaagagggcctgtacaacgagctccaaaaggataagatggcagaagcctatagcgagattggtatgaaaggggaacgcagaagaggcaaaggccacgacggactgtaccagggactcagcaccgccaccaaggacacctatgacgctcttcacatgcaggccctgccgcctcgg

SEQ ID NO: 245 - DNA, 1476 bp, Artificial Sequence
  source: /note="Description of Artificial Sequence: Synthetic polynucleotide"
atggccctccctgtcaccgccctgctgcttccgctggctcttctgctccacgccgctcggcccgaggtgcagcttgtggaaaccggtggcggactggtgcagcccggaggaagcctcaggctgtcctgcgccgcgtccggcttcaccttctcctcgtacgccatgtcctgggtccgccaggcccccggaaagggcctggaatgggtgtccgccatctctggaagcggaggttccacgtactacgcggacagcgtcaagggaaggttcacaatctcccgcgataattcgaagaacactctgtaccttcaaatgaacaccctgaaggccgaggacactgctgtgtactactgcgcacgggccacctacaagagagagctccggtactactacggaatggacgtctggggccagggaactactgtgaccgtgtcctcgggagggggtggctccggggggggcggctccggcggaggcggttccgagattgtgctgacccagtcaccttcaactctgtcgctgtccccgggagagagcgctactctgagctgccgggccagccagtccgtgtccaccaccttcctcgcctggtatcagcagaagccggggcaggcaccacggctcttgatctacgggtcaagcaacagagcgaccggaattcctgaccgcttctcggggagcggttcaggcaccgacttcaccctgactatccggcgcctggaacccgaagatttcgccgtgtattactgtcaacagtaccactcctcgccgtcctggacctttggccaaggaaccaaagtggaaatcaagaccactaccccagcaccgaggccacccaccccggctcctaccatcgcctcccagcctctgtccctgcgtccggaggcatgtagacccgcagctggtggggccgtgcatacccggggtcttgacttcgcctgcgatatctacatttgggcccctctggctggtacttgcggggtcctgctgctttcactcgtgatcactctttactgtaagcgcggtcggaagaagctgctgtacatctttaagcaacccttcatgaggcctgtgcagactactcaagaggaggacggctgttcatgccggttcccagaggaggaggaaggcggctgcgaactgcgcgtgaaattcagccgcagcgcagatgctccagcctacaagcaggggcagaaccagctctacaacgaactcaatcttggtcggagagaggagtacgacgtgctggacaagcggagaggacgggacccagaaatgggcgggaagccgcgcagaaagaatccccaagagggcctgtacaacgagctccaaaaggataagatggcagaagcctatagcgagattggtatgaaaggggaacgcagaagaggcaaaggccacgacggactgtaccagggactcagcaccgccaccaaggacacctatgacgctcttcacatgcaggccctgccgcctcgg

SEQ ID NO: 246 - DNA, 1449 bp, Artificial Sequence
  source: /note="Description of Artificial Sequence: Synthetic polynucleotide"
atggccctccctgtcaccgccctgctgcttccgctggctcttctgctccacgccgctcggcccgaagtgcagctcgtggaaactggaggtggactcgtgcagcctggacggtcgctgcggctgagctgcgctgcatccggcttcaccttcgacgattatgccatgcactgggtcagacaggcgccagggaagggacttgagtgggtgtccggtatcagctggaatagcggctcaatcggatacgcggactccgtgaagggaaggttcaccatttcccgcgacaacgccaagaactccctgtacttgcaaatgaacagcctccgggatgaggacactgccgtgtactactgcgcccgcgtcggaaaagctgtgcccgacgtctggggccagggaaccactgtgaccgtgtccagcggcgggggtggatcgggcggtggagggtccggtggagggggctcagatattgtgatgacccagaccccctcgtccctgtccgcctcggtcggcgaccgcgtgactatcacatgtagagcctcgcagagcatctccagctacctgaactggtatcagcagaagccggggaaggccccgaagctcctgatctacgcggcatcatcactgcaatcgggagtgccgagccggttttccgggtccggctccggcaccgacttcacgctgaccatttcttccctgcaacccgaggacttcgccacttactactgccagcagtcctactccaccccttactccttcggccaaggaaccaggctggaaatcaagaccactaccccagcaccgaggccacccaccccggctcctaccatcgcctcccagcctctgtccctgcgtccggaggcatgtagacccgcagctggtggggccgtgcatacccggggtcttgacttcgcctgcgatatctacatttgggcccctctggctggtacttgcggggtcctgctgctttcactcgtgatcactctttactgtaagcgcggtcggaagaagctgctgtacatctttaagcaacccttcatgaggcctgtgcagactactcaagaggaggacggctgttcatgccggttcccagaggaggaggaaggcggctgcgaactgcgcgtgaaattcagccgcagcgcagatgctccagcctacaagcaggggcagaaccagctctacaacgaactcaatcttggtcggagagaggagtacgacgtgctggacaagcggagaggacgggacccagaaatgggcgggaagccgcgcagaaagaatccccaagagggcctgtacaacgagctccaaaaggataagatggcagaagcctatagcgagattggtatgaaaggggaacgcagaagaggcaaaggccacgacggactgtaccagggactcagcaccgccaccaaggacacctatgacgctcttcacatgcaggccctgccgcctcgg

SEQ ID NO: 247 - DNA, 1470 bp, Artificial Sequence
  source: /note="Description of Artificial Sequence: Synthetic polynucleotide"
atggccctccctgtcaccgccctgctgcttccgctggctcttctgctccacgccgctcggcccgaagtgcagctcgtggagagcgggggaggattggtgcagcccggaaggtccctgcggctctcctgcactgcgtctggcttcaccttcgacgactacgcgatgcactgggtcagacagcgcccgggaaagggcctggaatgggtcgcctcaatcaactggaagggaaactccctggcctatggcgacagcgtgaagggccgcttcgccatttcgcgcgacaacgccaagaacaccgtgtttctgcaaatgaattccctgcggaccgaggataccgctgtgtactactgcgccagccaccagggcgtggcatactataactacgccatggacgtgtggggaagagggacgctcgtcaccgtgtcctccgggggcggtggatcgggtggaggaggaagcggtggcgggggcagcgaaatcgtgctgactcagagcccgggaactctttcactgtccccgggagaacgggccactctctcgtgccgggccacccagtccatcggctcctccttccttgcctggtaccagcagaggccaggacaggcgccccgcctgctgatctacggtgcttcccaacgcgccactggcattcctgaccggttcagcggcagagggtcgggaaccgatttcacactgaccatttcccgggtggagcccgaagattcggcagtctactactgtcagcattacgagtcctccccttcatggaccttcggtcaagggaccaaagtggagatcaagaccactaccccagcaccgaggccacccaccccggctcctaccatcgcctcccagcctctgtccctgcgtccggaggcatgtagacccgcagctggtggggccgtgcatacccggggtcttgacttcgcctgcgatatctacatttgggcccctctggctggtacttgcggggtcctgctgctttcactcgtgatcactctttactgtaagcgcggtcggaagaagctgctgtacatctttaagcaacccttcatgaggcctgtgcagactactcaagaggaggacggctgttcatgccggttcccagaggaggaggaaggcggctgcgaactgcgcgtgaaattcagccgcagcgcagatgctccagcctacaagcaggggcagaaccagctctacaacgaactcaatcttggtcggagagaggagtacgacgtgctggacaagcggagaggacgggacccagaaatgggcgggaagccgcgcagaaagaatccccaagagggcctgtacaacgagctccaaaaggataagatggcagaagcctatagcgagattggtatgaaaggggaacgcagaagaggcaaaggccacgacggactgtaccagggactcagcaccgccaccaaggacacctatgacgctcttcacatgcaggccctgccgcctcgg

SEQ ID NO: 248 - DNA, 1455 bp, Artificial Sequence
  source: /note="Description of Artificial Sequence: Synthetic polynucleotide"
atggccctccctgtcaccgccctgctgcttccgctggctcttctgctccacgccgctcggcccgaggtgcagttggtcgaaagcgggggcgggcttgtgcagcctggcggatcactgcggctgtcctgcgcggcatcaggcttcacgttttcttcctacgccatgtcctgggtgcgccaggcccctggaaagggactggaatgggtgtccgcgatttcggggtccggcgggagcacctactacgccgattccgtgaagggccgcttcactatctcgcgggacaactccaagaacaccctctacctccaaatgaatagcctgcgggccgaggataccgccgtctactattgcgctaaggtcgtgcgcgacggaatggacgtgtggggacagggtaccaccgtgacagtgtcctcggggggaggcggtagcggcggaggaggaagcggtggtggaggttccgagattgtgctgactcaatcacccgcgaccctgagcctgtcccccggcgaaagggccactctgtcctgtcgggccagccaatcagtctcctcctcgtacctggcctggtaccagcagaagccaggacaggctccgagactccttatctatggcgcatcctcccgcgccaccggaatcccggataggttctcgggaaacggatcggggaccgacttcactctcaccatctcccggctggaaccggaggacttcgccgtgtactactgccagcagtacggcagcccgcctagattcactttcggccccggcaccaaagtggacatcaagaccactaccccagcaccgaggccacccaccccggctcctaccatcgcctcccagcctctgtccctgcgtccggaggcatgtagacccgcagctggtggggccgtgcatacccggggtcttgacttcgcctgcgatatctacatttgggcccctctggctggtacttgcggggtcctgctgctttcactcgtgatcactctttactgtaagcgcggtcggaagaagctgctgtacatctttaagcaacccttcatgaggcctgtgcagactactcaagaggaggacggctgttcatgccggttcccagaggaggaggaaggcggctgcgaactgcgcgtgaaattcagccgcagcgcagatgctccagcctacaagcaggggcagaaccagctctacaacgaactcaatcttggtcggagagaggagtacgacgtgctggacaagcggagaggacgggacccagaaatgggcgggaagccgcgcagaaagaatccccaagagggcctgtacaacgagctccaaaaggataagatggcagaagcctatagcgagattggtatgaaaggggaacgcagaagaggcaaaggccacgacggactgtaccagggactcagcaccgccaccaaggacacctatgacgctcttcacatgcaggccctgccgcctcgg

SEQ ID NO: 249 - DNA, 1458 bp, Artificial Sequence
  source: /note="Description of Artificial Sequence: Synthetic polynucleotide"
atggccctccctgtcaccgccctgctgcttccgctggctcttctgctccacgccgctcggcccgaagtgcagctgctggagtccggcggtggattggtgcaaccggggggatcgctcagactgtcctgtgcggcgtcaggcttcaccttctcgagctacgccatgtcatgggtcagacaggcccctggaaagggtctggaatgggtgtccgccatttccgggagcgggggatctacatactacgccgatagcgtgaagggccgcttcaccatttcccgggacaactccaagaacactctctatctgcaaatgaactccctccgcgctgaggacactgccgtgtactactgcgccaaaatccctcagaccggcaccttcgactactggggacaggggactctggtcaccgtcagcagcggtggcggaggttcggggggaggaggaagcggcggcggagggtccgagattgtgctgacccagtcacccggcactttgtccctgtcgcctggagaaagggccaccctttcctgccgggcatcccaatccgtgtcctcctcgtacctggcctggtaccagcagaggcccggacaggccccacggcttctgatctacggagcaagcagccgcgcgaccggtatcccggaccggttttcgggctcgggctcaggaactgacttcaccctcaccatctcccgcctggaacccgaagatttcgctgtgtattactgccagcactacggcagctccccgtcctggacgttcggccagggaactcggctggagatcaagaccactaccccagcaccgaggccacccaccccggctcctaccatcgcctcccagcctctgtccctgcgtccggaggcatgtagacccgcagctggtggggccgtgcatacccggggtcttgacttcgcctgcgatatctacatttgggcccctctggctggtacttgcggggtcctgctgctttcactcgtgatcactctttactgtaagcgcggtcggaagaagctgctgtacatctttaagcaacccttcatgaggcctgtgcagactactcaagaggaggacggctgttcatgccggttcccagaggaggaggaaggcggctgcgaactgcgcgtgaaattcagccgcagcgcagatgctccagcctacaagcaggggcagaaccagctctacaacgaactcaatcttggtcggagagaggagtacgacgtgctggacaagcggagaggacgggacccagaaatgggcgggaagccgcgcagaaagaatccccaagagggcctgtacaacgagctccaaaaggataagatggcagaagcctatagcgagattggtatgaaaggggaacgcagaagaggcaaaggccacgacggactgtaccagggactcagcaccgccaccaaggacacctatgacgctcttcacatgcaggccctgccgcctcgg

SEQ ID NO: 250 - DNA, 1476 bp, Artificial Sequence
  source: /note="Description of Artificial Sequence: Synthetic polynucleotide"
atggccctccctgtcaccgccctgctgcttccgctggctcttctgctccacgccgctcggcccgaagtgcaactggtggaaaccggtggaggactcgtgcagcctggcggcagcctccggctgagctgcgccgcttcgggattcaccttttcctcctacgcgatgtcttgggtcagacaggcccccggaaaggggctggaatgggtgtcagccatctccggctccggcggatcaacgtactacgccgactccgtgaaaggccggttcaccatgtcgcgcgagaatgacaagaactccgtgttcctgcaaatgaactccctgagggtggaggacaccggagtgtactattgtgcgcgcgccaactacaagagagagctgcggtactactacggaatggacgtctggggacagggaactatggtgaccgtgtcatccggtggagggggaagcggcggtggaggcagcgggggcgggggttcagaaattgtcatgacccagtccccgggaactctttccctctcccccggggaatccgcgactttgtcctgccgggccagccagcgcgtggcctcgaactacctcgcatggtaccagcataagccaggccaagccccttccctgctgatttccggggctagcagccgcgccactggcgtgccggataggttctcgggaagcggctcgggtaccgatttcaccctggcaatctcgcggctggaaccggaggattcggccgtgtactactgccagcactatgactcatccccctcctggacattcggacagggcaccaaggtcgagatcaagaccactaccccagcaccgaggccacccaccccggctcctaccatcgcctcccagcctctgtccctgcgtccggaggcatgtagacccgcagctggtggggccgtgcatacccggggtcttgacttcgcctgcgatatctacatttgggcccctctggctggtacttgcggggtcctgctgctttcactcgtgatcactctttactgtaagcgcggtcggaagaagctgctgtacatctttaagcaacccttcatgaggcctgtgcagactactcaagaggaggacggctgttcatgccggttcccagaggaggaggaaggcggctgcgaactgcgcgtgaaattcagccgcagcgcagatgctccagcctacaagcaggggcagaaccagctctacaacgaactcaatcttggtcggagagaggagtacgacgtgctggacaagcggagaggacgggacccagaaatgggcgggaagccgcgcagaaagaatccccaagagggcctgtacaacgagctccaaaaggataagatggcagaagcctatagcgagattggtatgaaaggggaacgcagaagaggcaaaggccacgacggactgtaccagggactcagcaccgccaccaaggacacctatgacgctcttcacatgcaggccctgccgcctcgg

SEQ ID NO: 251 - DNA, 1464 bp, Artificial Sequence
  source: /note="Description of Artificial Sequence: Synthetic polynucleotide"
atggccctccctgtcaccgccctgctgcttccgctggctcttctgctccacgccgctcggcccgaagtgcagctgctcgaaaccggtggagggctggtgcagccagggggctccctgaggctttcatgcgccgctagcggattctccttctcctcttacgccatgtcgtgggtccgccaagcccctggaaaaggcctggaatgggtgtccgcgatttccgggagcggaggttcgacctattacgccgactccgtgaagggccgctttaccatctcccgggataactccaagaacactctgtacctccaaatgaactcgctgagagccgaggacaccgccgtgtattactgcgcgaaggcgctggtcggcgcgactggggcattcgacatctggggacagggaactcttgtgaccgtgtcgagcggaggcggcggctccggcggaggagggagcgggggcggtggttccgaaatcgtgttgactcagtccccgggaaccctgagcttgtcacccggggagcgggccactctctcctgtcgcgcctcccaatcgctctcatccaatttcctggcctggtaccagcagaagcccggacaggccccgggcctgctcatctacggcgcttcaaactgggcaacgggaacccctgatcggttcagcggaagcggatcgggtactgactttaccctgaccatcaccagactggaaccggaggacttcgccgtgtactactgccagtactacggcacctcccccatgtacacattcggacagggtaccaaggtcgagattaagaccactaccccagcaccgaggccacccaccccggctcctaccatcgcctcccagcctctgtccctgcgtccggaggcatgtagacccgcagctggtggggccgtgcatacccggggtcttgacttcgcctgcgatatctacatttgggcccctctggctggtacttgcggggtcctgctgctttcactcgtgatcactctttactgtaagcgcggtcggaagaagctgctgtacatctttaagcaacccttcatgaggcctgtgcagactactcaagaggaggacggctgttcatgccggttcccagaggaggaggaaggcggctgcgaactgcgcgtgaaattcagccgcagcgcagatgctccagcctacaagcaggggcagaaccagctctacaacgaactcaatcttggtcggagagaggagtacgacgtgctggacaagcggagaggacgggacccagaaatgggcgggaagccgcgcagaaagaatccccaagagggcctgtacaacgagctccaaaaggataagatggcagaagcctatagcgagattggtatgaaaggggaacgcagaagaggcaaaggccacgacggactgtaccagggactcagcaccgccaccaaggacacctatgacgctcttcacatgcaggccctgccgcctcgg

SEQ ID NO: 252 - DNA, 1464 bp, Artificial Sequence
  source: /note="Description of Artificial Sequence: Synthetic polynucleotide"
atggccctccctgtcaccgccctgctgcttccgctggctcttctgctccacgccgctcggcccgaagtgcagctgcttgagagcggtggaggtctggtgcagcccgggggatcactgcgcctgtcctgtgccgcgtccggtttcactttctcctcgtacgccatgtcgtgggtcagacaggcaccgggaaagggactggaatgggtgtcagccatttcgggttcggggggcagcacctactacgctgactccgtgaagggccggttcaccatttcccgcgacaactccaagaacaccttgtacctccaaatgaactccctgcgggccgaagataccgccgtgtattactgcgtgctgtggttcggagagggattcgacccgtggggacaaggaacactcgtgactgtgtcatccggcggaggcggcagcggtggcggcggttccggcggcggcggatctgacatcgtgttgacccagtcccctctgagcctgccggtcactcctggcgaaccagccagcatctcctgccggtcgagccagtccctcctgcactccaatgggtacaactacctcgattggtatctgcaaaagccgggccagagcccccagctgctgatctaccttgggtcaaaccgcgcttccggggtgcctgatagattctccgggtccgggagcggaaccgactttaccctgaaaatctcgagggtggaggccgaggacgtcggagtgtactactgcatgcaggcgctccagactcccctgaccttcggaggaggaacgaaggtcgacatcaagaccactaccccagcaccgaggccacccaccccggctcctaccatcgcctcccagcctctgtccctgcgtccggaggcatgtagacccgcagctggtggggccgtgcatacccggggtcttgacttcgcctgcgatatctacatttgggcccctctggctggtacttgcggggtcctgctgctttcactcgtgatcactctttactgtaagcgcggtcggaagaagctgctgtacatctttaagcaacccttcatgaggcctgtgcagactactcaagaggaggacggctgttcatgccggttcccagaggaggaggaaggcggctgcgaactgcgcgtgaaattcagccgcagcgcagatgctccagcctacaagcaggggcagaaccagctctacaacgaactcaatcttggtcggagagaggagtacgacgtgctggacaagcggagaggacgggacccagaaatgggcgggaagccgcgcagaaagaatccccaagagggcctgtacaacgagctccaaaaggataagatggcagaagcctatagcgagattggtatgaaaggggaacgcagaagaggcaaaggccacgacggactgtaccagggactcagcaccgccaccaaggacacctatgacgctcttcacatgcaggccctgccgcctcgg

SEQ ID NO: 253 - DNA, 1485 bp, Artificial Sequence
  source: /note="Description of Artificial Sequence: Synthetic polynucleotide"
atggccctccctgtcaccgccctgctgcttccgctggctcttctgctccacgccgctcggccccaagtgcagctcgtggagtcaggcggaggactggtgcagcccgggggctccctgagactttcctgcgcggcatcgggttttaccttctcctcctatgctatgtcctgggtgcgccaggccccgggaaagggactggaatgggtgtccgcaatcagcggtagcgggggctcaacatactacgccgactccgtcaagggtcgcttcactatttcccgggacaactccaagaataccctgtacctccaaatgaacagcctcagggccgaggatactgccgtgtactactgcgccaaagtcggatacgatagctccggttactaccgggactactacggaatggacgtgtggggacagggcaccaccgtgaccgtgtcaagcggcggaggcggttcaggagggggaggctccggcggtggagggtccgaaatcgtcctgactcagtcgcctggcactctgtcgttgtccccgggggagcgcgctaccctgtcgtgtcgggcgtcgcagtccgtgtcgagctcctacctcgcgtggtaccagcagaagcccggacaggcccctagacttctgatctacggcacttcttcacgcgccaccgggatcagcgacaggttcagcggctccggctccgggaccgacttcaccctgaccattagccggctggagcctgaagatttcgccgtgtattactgccaacactacggaaactcgccgccaaagttcacgttcggacccggaaccaagctggaaatcaagaccactaccccagcaccgaggccacccaccccggctcctaccatcgcctcccagcctctgtccctgcgtccggaggcatgtagacccgcagctggtggggccgtgcatacccggggtcttgacttcgcctgcgatatctacatttgggcccctctggctggtacttgcggggtcctgctgctttcactcgtgatcactctttactgtaagcgcggtcggaagaagctgctgtacatctttaagcaacccttcatgaggcctgtgcagactactcaagaggaggacggctgttcatgccggttcccagaggaggaggaaggcggctgcgaactgcgcgtgaaattcagccgcagcgcagatgctccagcctacaagcaggggcagaaccagctctacaacgaactcaatcttggtcggagagaggagtacgacgtgctggacaagcggagaggacgggacccagaaatgggcgggaagccgcgcagaaagaatccccaagagggcctgtacaacgagctccaaaaggataagatggcagaagcctatagcgagattggtatgaaaggggaacgcagaagaggcaaaggccacgacggactgtaccagggactcagcaccgccaccaaggacacctatgacgctcttcacatgcaggccctgccgcctcgg

SEQ ID NO: 254 - DNA, 1470 bp, Artificial Sequence
  source: /note="Description of Artificial Sequence: Synthetic polynucleotide"
atggccctccctgtcaccgccctgctgcttccgctggctcttctgctccacgccgctcggcccgaagtccaactggtggagtccgggggagggctcgtgcagcccggaggcagccttcggctgtcgtgcgccgcctccgggttcacgttctcatcctacgcgatgtcgtgggtcagacaggcaccaggaaagggactggaatgggtgtccgccattagcggctccggcggtagcacctactatgccgactcagtgaagggaaggttcactatctcccgcgacaacagcaagaacaccctgtacctccaaatgaactctctgcgggccgaggataccgcggtgtactattgcgccaagatgggttggtccagcggatacttgggagccttcgacatttggggacagggcactactgtgaccgtgtcctccgggggtggcggatcgggaggcggcggctcgggtggagggggttccgaaatcgtgttgacccagtcaccgggaaccctctcgctgtccccgggagaacgggctacactgtcatgtagagcgtcccagtccgtggcttcctcgttcctggcctggtaccagcagaagccgggacaggcaccccgcctgctcatctacggagccagcggccgggcgaccggcatccctgaccgcttctccggttccggctcgggcaccgactttactctgaccattagcaggcttgagcccgaggattttgccgtgtactactgccaacactacggggggagccctcgcctgaccttcggaggcggaactaaggtcgatatcaaaaccactaccccagcaccgaggccacccaccccggctcctaccatcgcctcccagcctctgtccctgcgtccggaggcatgtagacccgcagctggtggggccgtgcatacccggggtcttgacttcgcctgcgatatctacatttgggcccctctggctggtacttgcggggtcctgctgctttcactcgtgatcactctttactgtaagcgcggtcggaagaagctgctgtacatctttaagcaacccttcatgaggcctgtgcagactactcaagaggaggacggctgttcatgccggttcccagaggaggaggaaggcggctgcgaactgcgcgtgaaattcagccgcagcgcagatgctccagcctacaagcaggggcagaaccagctctacaacgaactcaatcttggtcggagagaggagtacgacgtgctggacaagcggagaggacgggacccagaaatgggcgggaagccgcgcagaaagaatccccaagagggcctgtacaacgagctccaaaaggataagatggcagaagcctatagcgagattggtatgaaaggggaacgcagaagaggcaaaggccacgacggactgtaccagggactcagcaccgccaccaaggacacctatgacgctcttcacatgcaggccctgccgcctcgg

SEQ ID NO: 255 - protein, 122 aa, Artificial Sequence
  source: /note="Description of Artificial Sequence: Synthetic polypeptide"
QIQLVQSGPDLKKPGETVKLSCKASGYTFTNFGMNWVKQAPGKGFKWMAWINTYTGESYFADDFKGRFAFSVETSATTAYLQINNLKTEDTATYFCARGEIYYGYDGGFAYWGQGTLVTVSA

SEQ ID NO: 256 - protein, 117 aa, Artificial Sequence
  source: /note="Description of Artificial Sequence: Synthetic polypeptide"
QIQLVQSGPELKKPGETVKISCKASGYTFTDYSINWVKRAPGKGLKWMGWINTETREPAYAYDFRGRFAFSLETSASTAYLQINNLKYEDTATYFCALDYSYAMDYWGQGTSVTVSS

SEQ ID NO: 257 - protein, 117 aa, Artificial Sequence
  source: /note="Description of Artificial Sequence: Synthetic polypeptide"
QIQLVQSGPELKKPGETVKISCKASGYTFRHYSMNWVKQAPGKGLKWMGRINTESGVPIYADDFKGRFAFSVETSASTAYLVINNLKDEDTASYFCSNDYLYSLDFWGQGTALTVSS

SEQ ID NO: 258 - protein, 117 aa, Artificial Sequence
  source: /note="Description of Artificial Sequence: Synthetic polypeptide"
QIQLVQSGPELKKPGETVKISCKASGYTFTHYSMNWVKQAPGKGLKWMGRINTETGEPLYADDFKGRFAFSLETSASTAYLVINNLKNEDTATFFCSNDYLYSCDYWGQGTTLTVSS

SEQ ID NO: 259 - protein, 107 aa, Artificial Sequence
  source: /note="Description of Artificial Sequence: Synthetic polypeptide"
DVVMTQSHRFMSTSVGDRVSITCRASQDVNTAVSWYQQKPGQSPKLLIFSASYRYTGVPDRFTGSGSGADFTLTISSVQAEDLAVYYCQQHYSTPWTFGGGTKLDIK

SEQ ID NO: 260 - protein, 111 aa, Artificial Sequence
  source: /note="Description of Artificial Sequence: Synthetic polypeptide"
DIVLTQSPASLAMSLGKRATISCRASESVSVIGAHLIHWYQQKPGQPPKLLIYLASNLETGVPARFSGSGSGTDFTLTIDPVEEDDVAIYSCLQSRIFPRTFGGGTKLEIK

SEQ ID NO: 261 - protein, 111 aa, Artificial Sequence
  source: /note="Description of Artificial Sequence: Synthetic polypeptide"
DIVLTQSPPSLAMSLGKRATISCRASESVTILGSHLIYWYQQKPGQPPTLLIQLASNVQTGVPARFSGSGSRTDFTLTIDPVEEDDVAVYYCLQSRTIPRTFGGGTKLEIK

SEQ ID NO: 262 - protein, 111 aa, Artificial Sequence; identical to SEQ ID NO: 261
  source: /note="Description of Artificial Sequence: Synthetic polypeptide"

SEQ ID NO: 263 - protein, 244 aa, Artificial Sequence
  source: /note="Description of Artificial Sequence: Synthetic polypeptide"
QIQLVQSGPDLKKPGETVKLSCKASGYTFTNFGMNWVKQAPGKGFKWMAWINTYTGESYFADDFKGRFAFSVETSATTAYLQINNLKTEDTATYFCARGEIYYGYDGGFAYWGQGTLVTVSAGGGGSGGGGSGGGGSDVVMTQSHRFMSTSVGDRVSITCRASQDVNTAVSWYQQKPGQSPKLLIFSASYRYTGVPDRFTGSGSGADFTLTISSVQAEDLAVYYCQQHYSTPWTFGGGTKLDIK

SEQ ID NO: 264 - protein, 249 aa, Artificial Sequence
  source: /note="Description of Artificial Sequence: Synthetic polypeptide"
QIQLVQSGPELKKPGETVKISCKASGYTFTDYSINWVKRAPGKGLKWMGWINTETREPAYAYDFRGRFAFSLETSASTAYLQINNLKYEDTATYFCALDYSYAMDYWGQGTSVTVSSGGGGSGGGGSGGGGSQIQLVQSGPELKKPGETVKISCKASGYTFTDYSINWVKRAPGKGLKWMGWINTETREPAYAYDFRGRFAFSLETSASTAYLQINNLKYEDTATYFCALDYSYAMDYWGQGTSVTVSS

SEQ ID NO: 265 - protein, 243 aa, Artificial Sequence
  source: /note="Description of Artificial Sequence: Synthetic polypeptide"
QIQLVQSGPELKKPGETVKISCKASGYTFRHYSMNWVKQAPGKGLKWMGRINTESGVPIYADDFKGRFAFSVETSASTAYLVINNLKDEDTASYFCSNDYLYSLDFWGQGTALTVSSGGGGSGGGGSGGGGSDIVLTQSPPSLAMSLGKRATISCRASESVTILGSHLIYWYQQKPGQPPTLLIQLASNVQTGVPARFSGSGSRTDFTLTIDPVEEDDVAVYYCLQSRTIPRTFGGGTKLEIK

SEQ ID NO: 266 - protein, 243 aa, Artificial Sequence
  source: /note="Description of Artificial Sequence: Synthetic polypeptide"
QIQLVQSGPELKKPGETVKISCKASGYTFTHYSMNWVKQAPGKGLKWMGRINTETGEPLYADDFKGRFAFSLETSASTAYLVINNLKNEDTATFFCSNDYLYSCDYWGQGTTLTVSSGGGGSGGGGSGGGGSDIVLTQSPPSLAMSLGKRATISCRASESVTILGSHLIYWYQQKPGQPPTLLIQLASNVQTGVPARFSGSGSRTDFTLTIDPVEEDDVAVYYCLQSRTIPRTFGGGTKLEIK

SEQ ID NO: 267 - protein, 467 aa, Artificial Sequence
  source: /note="Description of Artificial Sequence: Synthetic polypeptide"
QIQLVQSGPDLKKPGETVKLSCKASGYTFTNFGMNWVKQAPGKGFKWMAWINTYTGESYFADDFKGRFAFSVETSATTAYLQINNLKTEDTATYFCARGEIYYGYDGGFAYWGQGTLVTVSAGGGGSGGGGSGGGGSDVVMTQSHRFMSTSVGDRVSITCRASQDVNTAVSWYQQKPGQSPKLLIFSASYRYTGVPDRFTGSGSGADFTLTISSVQAEDLAVYYCQQHYSTPWTFGGGTKLDIKTTTPAPRPPTPAPTIASQPLSLRPEACRPAAGGAVHTRGLDFACDIYIWAPLAGTCGVLLLSLVITLYCKRGRKKLLYIFKQPFMRPVQTTQEEDGCSCRFPEEEEGGCELRVKFSRSADAPAYKQGQNQLYNELNLGRREEYDVLDKRRGRDPEMGGKPRRKNPQEGLYNELQKDKMAEAYSEIGMKGERRRGKGHDGLYQGLSTATKDTYDALHMQALPPR

SEQ ID NO: 268 - protein, 472 aa, Artificial Sequence
  source: /note="Description of Artificial Sequence: Synthetic polypeptide"
QIQLVQSGPELKKPGETVKISCKASGYTFTDYSINWVKRAPGKGLKWMGWINTETREPAYAYDFRGRFAFSLETSASTAYLQINNLKYEDTATYFCALDYSYAMDYWGQGTSVTVSSGGGGSGGGGSGGGGSQIQLVQSGPELKKPGETVKISCKASGYTFTDYSINWVKRAPGKGLKWMGWINTETREPAYAYDFRGRFAFSLETSASTAYLQINNLKYEDTATYFCALDYSYAMDYWGQGTSVTVSSTTTPAPRPPTPAPTIASQPLSLRPEACRPAAGGAVHTRGLDFACDIYIWAPLAGTCGVLLLSLVITLYCKRGRKKLLYIFKQPFMRPVQTTQEEDGCSCRFPEEEEGGCELRVKFSRSADAPAYKQGQNQLYNELNLGRREEYDVLDKRRGRDPEMGGKPRRKNPQEGLYNELQKDKMAEAYSEIGMKGERRRGKGHDGLYQGLSTATKDTYDALHMQALPPR

SEQ ID NO: 269 - protein, 466 aa, Artificial Sequence
  source: /note="Description of Artificial Sequence: Synthetic polypeptide"
QIQLVQSGPELKKPGETVKISCKASGYTFRHYSMNWVKQAPGKGLKWMGRINTESGVPIYADDFKGRFAFSVETSASTAYLVINNLKDEDTASYFCSNDYLYSLDFWGQGTALTVSSGGGGSGGGGSGGGGSDIVLTQSPPSLAMSLGKRATISCRASESVTILGSHLIYWYQQKPGQPPTLLIQLASNVQTGVPARFSGSGSRTDFTLTIDPVEEDDVAVYYCLQSRTIPRTFGGGTKLEIKTTTPAPRPPTPAPTIASQPLSLRPEACRPAAGGAVHTRGLDFACDIYIWAPLAGTCGVLLLSLVITLYCKRGRKKLLYIFKQPFMRPVQTTQEEDGCSCRFPEEEEGGCELRVKFSRSADAPAYKQGQNQLYNELNLGRREEYDVLDKRRGRDPEMGGKPRRKNPQEGLYNELQKDKMAEAYSEIGMKGERRRGKGHDGLYQGLSTATKDTYDALHMQALPPR

SEQ ID NO: 270 - protein, 466 aa, Artificial Sequence
  source: /note="Description of Artificial Sequence: Synthetic polypeptide"
QIQLVQSGPELKKPGETVKISCKASGYTFTHYSMNWVKQAPGKGLKWMGRINTETGEPLYADDFKGRFAFSLETSASTAYLVINNLKNEDTATFFCSNDYLYSCDYWGQGTTLTVSSGGGGSGGGGSGGGGSDIVLTQSPPSLAMSLGKRATISCRASESVTILGSHLIYWYQQKPGQPPTLLIQLASNVQTGVPARFSGSGSRTDFTLTIDPVEEDDVAVYYCLQSRTIPRTFGGGTKLEIKTTTPAPRPPTPAPTIASQPLSLRPEACRPAAGGAVHTRGLDFACDIYIWAPLAGTCGVLLLSLVITLYCKRGRKKLLYIFKQPFMRPVQTTQEEDGCSCRFPEEEEGGCELRVKFSRSADAPAYKQGQNQLYNELNLGRREEYDVLDKRRGRDPEMGGKPRRKNPQEGLYNELQKDKMAEAYSEIGMKGERRRGKGHDGLYQGLSTATKDTYDALHMQALPPR

SEQ ID NO: 271 - protein, 249 aa, Artificial Sequence
  source: /note="Description of Artificial Sequence: Synthetic polypeptide"
QVQLVQSGAEVKKPGSSVKVSCKASGGTFSNYWMHWVRQAPGQGLEWMGATYRGHSDTYYNQKFKGRVTITADKSTSTAYMELSSLRSEDTAVYYCARGAIYNGYDVLDNWGQGTLVTVSSGGGGSGGGGSGGGGSGGGGSDIQMTQSPSSLSASVGDRVTITCSASQDISNYLNWYQQKPGKAPKLLIYYTSNLHSGVPSRFSGSGSGTDFTLTISSLQPEDFATYYCQQYRKLPWTFGQGTKLEIKR

SEQ ID NO: 272 - DNA, 747 bp, Artificial Sequence
  source: /note="Description of Artificial Sequence: Synthetic polynucleotide"
caggtgcagctggtccagagcggcgccgaagtgaagaagcccggcagctccgtgaaagtgagctgcaaggccagcggcggcaccttcagcaactactggatgcactgggtgaggcaggcccccggacagggcctggagtggatgggcgccacctacaggggccacagcgacacctactacaaccagaagttcaagggccgggtgaccatcaccgccgacaagagcaccagcaccgcctacatggaactgagcagcctcaggagcgaggacaccgctgtgtattactgcgccaggggcgccatctacaacggctacgacgtgctggacaactggggccagggcacactagtgaccgtgtccagcggtggaggaggtagcggaggaggcgggagcggtggaggtggctctggaggtggcggaagcgacatccagatgacccagagccctagctcactgagcgccagcgtgggcgacagggtgaccattacctgctccgccagccaggacatcagcaactacctgaactggtaccagcagaagcccggcaaggcccccaagctgctgatctactacacctccaacctgcactccggcgtgcccagcaggttcagcggaagcggcagcggcaccgatttcaccctgaccatctccagcctgcagcccgaggacttcgccacctactactgccagcagtacaggaagctcccctggactttcggccagggcaccaaactggagatcaagcgt

SEQ ID NO: 273 - protein, 249 aa, Artificial Sequence
  source: /note="Description of Artificial Sequence: Synthetic polypeptide"
DIQMTQSPSSLSASVGDRVTITCSASQDISNYLNWYQQKPGKAPKLLIYYTSNLHSGVPSRFSGSGSGTDFTLTISSLQPEDFATYYCQQYRKLPWTFGQGTKLEIKRGGGGSGGGGSGGGGSGGGGSQVQLVQSGAEVKKPGSSVKVSCKASGGTFSNYWMHWVRQAPGQGLEWMGATYRGHSDTYYNQKFKGRVTITADKSTSTAYMELSSLRSEDTAVYYCARGAIYNGYDVLDNWGQGTLVTVSS

SEQ ID NO: 274 - DNA, 747 bp, Artificial Sequence
  source: /note="Description of Artificial Sequence: Synthetic polynucleotide"
gacatccagatgacccagagccctagctcactgagcgccagcgtgggcgacagggtgaccattacctgctccgccagccaggacatcagcaactacctgaactggtaccagcagaagcccggcaaggcccccaagctgctgatctactacacctccaacctgcactccggcgtgcccagcaggttcagcggaagcggcagcggcaccgatttcaccctgaccatctccagcctgcagcccgaggacttcgccacctactactgccagcagtacaggaagctcccctggactttcggccagggcaccaaactggagatcaagcgtggtggaggaggtagcggaggaggcgggagcggtggaggtggctctggaggtggcggaagccaggtgcagctggtccagagcggcgccgaagtgaagaagcccggcagctccgtgaaagtgagctgcaaggccagcggcggcaccttcagcaactactggatgcactgggtgaggcaggcccccggacagggcctggagtggatgggcgccacctacaggggccacagcgacacctactacaaccagaagttcaagggccgggtgaccatcaccgccgacaagagcaccagcaccgcctacatggaactgagcagcctcaggagcgaggacaccgctgtgtattactgcgccaggggcgccatctacaacggctacgacgtgctggacaactggggccagggcacactagtgaccgtgtccagc

SEQ ID NO: 275 - protein, 132 aa, Artificial Sequence
  source: /note="Description of Artificial Sequence: Synthetic polypeptide"
DVPDYASLGGPSSPKKKRKVSRGVQVETISPGDGRTFPKRGQTCVVHYTGMLEDGKKFDSSRDRNKPFKFMLGKQEVIRGWEEGVAQMSVGQRAKLTISPDYAYGATGHPGIIPPHATLVFDVELLKLETSY

SEQ ID NO: 276 - protein, 108 aa, Artificial Sequence
  source: /note="Description of Artificial Sequence: Synthetic polypeptide"
VQVETISPGDGRTFPKRGQTCVVHYTGMLEDGKKFDSSRDRNKPFKFMLGKQEVIRGWEEGVAQMSVGQRAKLTISPDYAYGATGHPGIIPPHATLVFDVELLKLETS

SEQ ID NO: 277 - protein, 93 aa, Artificial Sequence [sequence omitted]

SEQ ID NO: 278 - protein, 95 aa, Artificial Sequence
  source: /note="Description of Artificial Sequence: Synthetic polypeptide"
ILWHEMWHEGLIEASRLYFGERNVKGMFEVLEPLHAMMERGPQTLKETSFNQAYGRDLMEAQEWCRKYMKSGNVKDLTQAWDLYYHVFRRISKTS

SEQ ID NO: 279 - protein, 95 aa, Artificial Sequence
  source: /note="Description of Artificial Sequence: Synthetic polypeptide"
ILWHEMWHEGLLEASRLYFGERNVKGMFEVLEPLHAMMERGPQTLKETSFNQAYGRDLMEAQEWCRKYMKSGNVKDLTQAWDLYYHVFRRISKTS

SEQ ID NO: 280 - protein, 95 aa, Artificial Sequence
  source: /note="Description of Artificial Sequence: Synthetic polypeptide"
ILWHEMWHEGLEEASRLYFGERNVKGMFEVLEPLHAMMERGPQTLKETSFNQAYGRDLMEAQEWCRKYMKSGNVKDLLQAWDLYYHVFRRISKTS

SEQ ID NO: 281 - protein, 95 aa, Artificial Sequence
  source: /note="Description of Artificial Sequence: Synthetic polypeptide"
  MOD_RES (12)..(12): Any amino acid
  MOD_RES (78)..(78): Any amino acid
ILWHEMWHEGLXEASRLYFGERNVKGMFEVLEPLHAMMERGPQTLKETSFNQAYGRDLMEAQEWCRKYMKSGNVKDLXQAWDLYYHVFRRISKTS

SEQ ID NO: 282 - protein, 95 aa, Artificial Sequence
  source: /note="Description of Artificial Sequence: Synthetic polypeptide"
ILWHEMWHEGLIEASRLYFGERNVKGMFEVLEPLHAMMERGPQTLKETSFNQAYGRDLMEAQEWCRKYMKSGNVKDLLQAWDLYYHVFRRISKTS

SEQ ID NO: 283 - protein, 95 aa, Artificial Sequence
  source: /note="Description of Artificial Sequence: Synthetic polypeptide"
ILWHEMWHEGLLEASRLYFGERNVKGMFEVLEPLHAMMERGPQTLKETSFNQAYGRDLMEAQEWCRKYMKSGNVKDLLQAWDLYYHVFRRISKTS

SEQ ID NO: 284-285 - skipped (2 entries)

SEQ ID NO: 286 - DNA, 19 bp, Mus musculus
ggaggtccctcaccttcta

SEQ ID NO: 287 - DNA, 19 bp, Mus musculus
cggaggatcttatgctgaa

SEQ ID NO: 288 - DNA, 19 bp, Mus musculus
cccgcttccagatcataca

SEQ ID NO: 289 - DNA, 19 bp, Mus musculus
ggagacctcaacaagatat

SEQ ID NO: 290 - DNA, 19 bp, Mus musculus
aaggcatggtcattggtat

SEQ ID NO: 291 - DNA, 19 bp, Mus musculus
gcatggtcattggtatcat

SEQ ID NO: 292 - DNA, 19 bp, Mus musculus
ggtcattggtatcatgagt

SEQ ID NO: 293 - DNA, 19 bp, Mus musculus
cctagtgggtatccctgta

SEQ ID NO: 294 - DNA, 19 bp, Mus musculus
gaggatggacattgttctt

SEQ ID NO: 295 - DNA, 19 bp, Mus musculus
gcatgcaggctacagttca

SEQ ID NO: 296 - DNA, 19 bp, Mus musculus
ccagcacatgcactgttga

SEQ ID NO: 297 - DNA, 19 bp, Mus musculus
cacatgcactgttgagtga

SEQ ID NO: 298 - DNA, 21 bp, Mus musculus
ctggaggtccctcaccttcta

SEQ ID NO: 299 - DNA, 21 bp, Mus musculus
gtcggaggatcttatgctgaa

SEQ ID NO: 300 - DNA, 21 bp, Mus musculus
tgcccgcttccagatcataca

SEQ ID NO: 301 - DNA, 21 bp, Mus musculus
ctggagacctcaacaagatat

SEQ ID NO: 302 - DNA, 21 bp, Mus musculus
tcaaggcatggtcattggtat

SEQ ID NO: 303 - DNA, 21 bp, Mus musculus
aggcatggtcattggtatcat

SEQ ID NO: 304 - DNA, 21 bp, Mus musculus
atggtcattggtatcatgagt

SEQ ID NO: 305 - DNA, 21 bp, Mus musculus
gccctagtgggtatccctgta

SEQ ID NO: 306 - DNA, 21 bp, Mus musculus
atgaggatggacattgttctt

SEQ ID NO: 307 - DNA, 21 bp, Mus musculus
gagcatgcaggctacagttca

SEQ ID NO: 308 - DNA, 21 bp, Mus musculus
ttccagcacatgcactgttga

SEQ ID NO: 309 - DNA, 21 bp, Mus musculus
agcacatgcactgttgagtga

SEQ ID NO: 310 - DNA, 21 bp, Mus musculus
tagaaggtgagggacctccag

SEQ ID NO: 311 - DNA, 21 bp, Mus musculus
ttcagcataagatcctccgac

SEQ ID NO: 312 - DNA, 21 bp, Mus musculus
tgtatgatctggaagcgggca

SEQ ID NO: 313 - DNA, 21 bp, Mus musculus
atatcttgttgaggtctccag

SEQ ID NO: 314 - DNA, 21 bp, Mus musculus
ataccaatgaccatgccttga

SEQ ID NO: 315 - DNA, 21 bp, Mus musculus
atgataccaatgaccatgcct

SEQ ID NO: 316 - DNA, 21 bp, Mus musculus
atggtcattggtatcatgagt

SEQ ID NO: 317 - DNA, 21 bp, Mus musculus
gccctagtgggtatccctgta

SEQ ID NO: 318 - DNA, 21 bp, Mus musculus
atgaggatggacattgttctt

SEQ ID NO: 319 - DNA, 21 bp, Mus musculus
gagcatgcaggctacagttca

SEQ ID NO: 320 - DNA, 21 bp, Mus musculus
ttccagcacatgcactgttga

SEQ ID NO: 321 - DNA, 21 bp, Mus musculus
agcacatgcactgttgagtga

SEQ ID NO: 322 - DNA, 19 bp, Mus musculus
tagaaggtgagggacctcc

SEQ ID NO: 323 - DNA, 19 bp, Mus musculus
ttcagcataagatcctccg

SEQ ID NO: 324 - DNA, 19 bp, Mus musculus
tgtatgatctggaagcggg

SEQ ID NO: 325 - DNA, 19 bp, Mus musculus
atatcttgttgaggtctcc

SEQ ID NO: 326 - DNA, 19 bp, Mus musculus
ataccaatgaccatgcctt

SEQ ID NO: 327 - DNA, 19 bp, Mus musculus
atgataccaatgaccatgc

SEQ ID NO: 328 - DNA, 19 bp, Mus musculus
atggtcattggtatcatga

SEQ ID NO: 329 - DNA, 19 bp, Mus musculus
gccctagtgggtatccctg

SEQ ID NO: 330 - DNA, 19 bp, Mus musculus
atgaggatggacattgttc

SEQ ID NO: 331 - DNA, 19 bp, Mus musculus
gagcatgcaggctacagtt

SEQ ID NO: 332 - DNA, 19 bp, Mus musculus
ttccagcacatgcactgtt

SEQ ID NO: 333 - DNA, 19 bp, Mus musculus
agcacatgcactgttgagt

SEQ ID NO: 334 - DNA, 19 bp, Homo sapiens
ggccaggatggttcttaga

SEQ ID NO: 335 - DNA, 19 bp, Homo sapiens
gcttcgtgctaaactggta

SEQ ID NO: 336 - DNA, 19 bp, Homo sapiens
gggcgtgacttccacatga

SEQ ID NO: 337 - DNA, 19 bp, Homo sapiens
caggcctagagaagtttca

SEQ ID NO: 338 - DNA, 19 bp, Homo sapiens
cttggaacccattcctgaa

SEQ ID NO: 339 - DNA, 19 bp, Homo sapiens
ggaacccattcctgaaatt

SEQ ID NO: 340 - DNA, 19 bp, Homo sapiens
gaacccattcctgaaatta

SEQ ID NO: 341 - DNA, 19 bp, Homo sapiens
aacccattcctgaaattat

SEQ ID NO: 342 - DNA, 19 bp, Homo sapiens
acccattcctgaaattatt

SEQ ID NO: 343 - DNA, 19 bp, Homo sapiens
cccattcctgaaattattt

SEQ ID NO: 344 - DNA, 19 bp, Homo sapiens
ctgtggttctattatatta

SEQ ID NO: 345 - DNA, 19 bp, Homo sapiens
aaatatgagagcatgctaa

SEQ ID NO: 346 - DNA, 19 bp, Homo sapiens
tctaagaaccatcctggcc

SEQ ID NO: 347 - DNA, 19 bp, Homo sapiens
taccagtttagcacgaagc

SEQ ID NO: 348 - DNA, 19 bp, Homo sapiens
tcatgtggaagtcacgccc

SEQ ID NO: 349 - DNA, 19 bp, Homo sapiens
tgaaacttctctaggcctg

SEQ ID NO: 350 - DNA, 19 bp, Homo sapiens
ttcaggaatgggttccaag

SEQ ID NO: 351 - DNA, 19 bp, Homo sapiens
aatttcaggaatgggttcc

SEQ ID NO: 352 - DNA, 19 bp, Homo sapiens
taatttcaggaatgggttc

SEQ ID NO: 353 - DNA, 19 bp, Homo sapiens
ataatttcaggaatgggtt

SEQ ID NO: 354 - DNA, 19 bp, Homo sapiens
aataatttcaggaatgggt

SEQ ID NO: 355 - DNA, 19 bp, Homo sapiens
aaataatttcaggaatggg

SEQ ID NO: 356 - DNA, 19 bp, Homo sapiens
taatataatagaaccacag

SEQ ID NO: 357 - DNA, 19 bp, Homo sapiens
ttagcatgctctcatattt

SEQ ID NO: 358 - DNA, 21 bp, Homo sapiens
gcggccaggatggttcttaga

SEQ ID NO: 359 - DNA, 21 bp, Homo sapiens
gagcttcgtgctaaactggta

SEQ ID NO: 360 - DNA, 21 bp, Homo sapiens
acgggcgtgacttccacatga

SEQ ID NO: 361 - DNA, 21 bp, Homo sapiens
tgcaggcctagagaagtttca

SEQ ID NO: 362 - DNA, 21 bp, Homo sapiens
tccttggaacccattcctgaa

SEQ ID NO: 363 - DNA, 21 bp, Homo sapiens
ttggaacccattcctgaaatt

SEQ ID NO: 364 - DNA, 21 bp, Homo sapiens
tggaacccattcctgaaatta

SEQ ID NO: 365 - DNA, 21 bp, Homo sapiens
ggaacccattcctgaaattat

SEQ ID NO: 366 - DNA, 21 bp, Homo sapiens
gaacccattcctgaaattatt

SEQ ID NO: 367 - DNA, 21 bp, Homo sapiens
aacccattcctgaaattattt

SEQ ID NO: 368 - DNA, 21 bp, Homo sapiens
ccctgtggttctattatatta

SEQ ID NO: 369 - DNA, 21 bp, Homo sapiens
ttaaatatgagagcatgctaa

SEQ ID NO: 370 - DNA, 21 bp, Homo sapiens
tctaagaaccatcctggccgc

SEQ ID NO: 371 - DNA, 21 bp, Homo sapiens
taccagtttagcacgaagctc

SEQ ID NO: 372 - DNA, 21 bp, Homo sapiens
tcatgtggaagtcacgcccgt

SEQ ID NO: 373 - DNA, 21 bp, Homo sapiens
tgaaacttctctaggcctgca

SEQ ID NO: 374 - DNA, 21 bp, Homo sapiens
ttcaggaatgggttccaagga

SEQ ID NO: 375 - DNA, 21 bp, Homo sapiens
aatttcaggaatgggttccaa

SEQ ID NO: 376 - DNA, 21 bp, Homo sapiens
taatttcaggaatgggttcca

SEQ ID NO: 377 - DNA, 21 bp, Homo sapiens
ataatttcaggaatgggttcc

SEQ ID NO: 378 - DNA, 21 bp, Homo sapiens
aataatttcaggaatgggttc

SEQ ID NO: 379 - DNA, 21 bp, Homo sapiens
aaataatttcaggaatgggtt

SEQ ID NO: 380 - DNA, 21 bp, Homo sapiens
taatataatagaaccacaggg

SEQ ID NO: 381 - DNA, 21 bp, Homo sapiens
ttagcatgctctcatatttaa

SEQ ID NO: 382 - skipped

SEQ ID NO: 383 - protein, 4 aa, Artificial Sequence
  source: /note="Description of Artificial Sequence: Synthetic peptide"
RGDS

SEQ ID NO: 384 - protein, 5 aa, Artificial Sequence
  source: /note="Description of Artificial Sequence: Synthetic peptide"
NYAMS

SEQ ID NO: 385 - protein, 5 aa, Artificial Sequence
  source: /note="Description of Artificial Sequence: Synthetic peptide"
DYAMH

SEQ ID NO: 386 - protein, 5 aa, Artificial Sequence
  source: /note="Description of Artificial Sequence: Synthetic peptide"
NHGMS

SEQ ID NO: 387 - protein, 5 aa, Artificial Sequence
  source: /note="Description of Artificial Sequence: Synthetic peptide"
NFGIN

SEQ ID NO: 388 - protein, 5 aa, Artificial Sequence
  source: /note="Description of Artificial Sequence: Synthetic peptide"
SDAMT

SEQ ID NO: 389 - protein, 5 aa, Artificial Sequence
  source: /note="Description of Artificial Sequence: Synthetic peptide"
NYGIT

SEQ ID NO: 390 - protein, 5 aa, Artificial Sequence
  source: /note="Description of Artificial Sequence: Synthetic peptide"
NHGMS

SEQ ID NO: 391 - protein, 5 aa, Artificial Sequence
  source: /note="Description of Artificial Sequence: Synthetic peptide"
NHGMS

SEQ ID NO: 392 - protein, 5 aa, Artificial Sequence
  source: /note="Description of Artificial Sequence: Synthetic peptide"
NHGMS

SEQ ID NO: 393 - protein, 5 aa, Artificial Sequence
  source: /note="Description of Artificial Sequence: Synthetic peptide"
DYYMS

SEQ ID NO: 394 - protein, 5 aa, Artificial Sequence
  source: /note="Description of Artificial Sequence: Synthetic peptide"
NHGMS

SEQ ID NO: 395 - protein, 5 aa, Artificial Sequence
  source: /note="Description of Artificial Sequence: Synthetic peptide"
DYYMS

SEQ ID NO: 396 - protein, 5 aa, Artificial Sequence
  source: /note="Description of Artificial Sequence: Synthetic peptide"
NHGMS

SEQ ID NO: 397 - protein, 5 aa, Artificial Sequence
  source: /note="Description of Artificial Sequence: Synthetic peptide"
NHGMS

SEQ ID NO: 398 - protein, 5 aa, Artificial Sequence
  source: /note="Description of Artificial Sequence: Synthetic peptide"
NHGMS

SEQ ID NO: 399 - protein, 7 aa, Artificial Sequence
  source: /note="Description of Artificial Sequence: Synthetic peptide"
SSYYYWG

SEQ ID NO: 400 - protein, 7 aa, Artificial Sequence
  source: /note="Description of Artificial Sequence: Synthetic peptide"
TSGMCVS

SEQ ID NO: 401 - protein, 5 aa, Artificial Sequence
  source: /note="Description of Artificial Sequence: Synthetic peptide"
SYSMN

SEQ ID NO: 402 - protein, 5 aa, Artificial Sequence
  source: /note="Description of Artificial Sequence: Synthetic peptide"
DYYMS

SEQ ID NO: 403 - protein, 5 aa, Artificial Sequence
  source: /note="Description of Artificial Sequence: Synthetic peptide"
SHYIH

SEQ ID NO: 404 - protein, 7 aa, Artificial Sequence
  source: /note="Description of Artificial Sequence: Synthetic peptide"
SGGYYWS

SEQ ID NO: 405 - protein, 5 aa, Artificial Sequence
  source: /note="Description of Artificial Sequence: Synthetic peptide"
SYAIS

SEQ ID NO: 406 - protein, 7 aa, Artificial Sequence
  source: /note="Description of Artificial Sequence: Synthetic peptide"
SNSAAWN

SEQ ID NO: 407 - protein, 5 aa, Artificial Sequence
  source: /note="Description of Artificial Sequence: Synthetic peptide"
SYAMS

SEQ ID NO: 408 - protein, 5 aa, Artificial Sequence
  source: /note="Description of Artificial Sequence: Synthetic peptide"
RYPMS

SEQ ID NO: 409 - protein, 5 aa, Artificial Sequence
  source: /note="Description of Artificial Sequence: Synthetic peptide"
SYAMS

SEQ ID NO: 410 - protein, 5 aa, Artificial Sequence
  source: /note="Description of Artificial Sequence: Synthetic peptide"
SYAMS

SEQ ID NO: 411 - protein, 5 aa, Artificial Sequence
  source: /note="Description of Artificial Sequence: Synthetic peptide"
DYAMH

SEQ ID NO: 412 - protein, 5 aa, Artificial Sequence
  source: /note="Description of Artificial Sequence: Synthetic peptide"
DYAMH

SEQ ID NO: 413 - protein, 5 aa, Artificial Sequence
  source: /note="Description of Artificial Sequence: Synthetic peptide"
SYAMS

SEQ ID NO: 414 - protein, 5 aa, Artificial Sequence
  source: /note="Description of Artificial Sequence: Synthetic peptide"
SYAMS

SEQ ID NO: 415 - protein, 5 aa, Artificial Sequence
  source: /note="Description of Artificial Sequence: Synthetic peptide"
SYAMS

SEQ ID NO: 416 - protein, 5 aa, Artificial Sequence
  source: /note="Description of Artificial Sequence: Synthetic peptide"
SYAMS

SEQ ID NO: 417 - protein, 5 aa, Artificial Sequence
  source: /note="Description of Artificial Sequence: Synthetic peptide"
SYAMS

SEQ ID NO: 418 - protein, 5 aa, Artificial Sequence
  source: /note="Description of Artificial Sequence: Synthetic peptide"
SYAMS

SEQ ID NO: 419 - protein, 5 aa, Artificial Sequence
  source: /note="Description of Artificial Sequence: Synthetic peptide"
SYAMS

SEQ ID NO: 420 - protein, 5 aa, Artificial Sequence
  source: /note="Description of Artificial Sequence: Synthetic peptide"
NFGMN

SEQ ID NO: 421 - protein, 5 aa, Artificial Sequence
  source: /note="Description of Artificial Sequence: Synthetic peptide"
DYSIN

SEQ ID NO: 422 - protein, 5 aa, Artificial Sequence
  source: /note="Description of Artificial Sequence: Synthetic peptide"
HYSMN

SEQ ID NO: 423 - protein, 5 aa, Artificial Sequence
  source: /note="Description of Artificial Sequence: Synthetic peptide"
HYSMN

SEQ ID NO: 424 - protein, 17 aa, Artificial Sequence
  source: /note="Description of Artificial Sequence: Synthetic peptide"
GISRSGENTYYADSVKG

SEQ ID NO: 425 - protein, 17 aa, Artificial Sequence
  source: /note="Description of Artificial Sequence: Synthetic peptide"
GISWNSGSIGYADSVKG

SEQ ID NO: 426 - protein, 16 aa, Artificial Sequence
  source: /note="Description of Artificial Sequence: Synthetic peptide"
GIVYSGSTYYAASVKG

SEQ ID NO: 427 - protein, 17 aa, Artificial Sequence
  source: /note="Description of Artificial Sequence: Synthetic peptide"
WINPKNNNTNYAQKFQG

SEQ ID NO: 428 - protein, 17 aa, Artificial Sequence
  source: /note="Description of Artificial Sequence: Synthetic peptide"
VISGSGGTTYYADSVKG

SEQ ID NO: 429 - protein, 17 aa, Artificial Sequence
  source: /note="Description of Artificial Sequence: Synthetic peptide"
WISAYNGNTNYAQKFQG

SEQ ID NO: 430 - protein, 16 aa, Artificial Sequence
  source: /note="Description of Artificial Sequence: Synthetic peptide"
GIVYSGSTYYAASVKG

SEQ ID NO: 431 - protein, 16 aa, Artificial Sequence
  source: /note="Description of Artificial Sequence: Synthetic peptide"
GIVYSGSTYYAASVKG

SEQ ID NO: 432 - protein, 16 aa, Artificial Sequence
  source: /note="Description of Artificial Sequence: Synthetic peptide"
GIVYSGSTYYAASVKG

SEQ ID NO: 433 - protein, 17 aa, Artificial Sequence
  source: /note="Description of Artificial Sequence: Synthetic peptide"
YISSSGSTIYYADSVKG

SEQ ID NO: 434 - protein, 16 aa, Artificial Sequence
  source: /note="Description of Artificial Sequence: Synthetic peptide"
GIVYSGSTYYAASVKG

SEQ ID NO: 435 - protein, 17 aa, Artificial Sequence
  source: /note="Description of Artificial Sequence: Synthetic peptide"
YISSSGNTIYYADSVKG

SEQ ID NO: 436 - protein, 16 aa, Artificial Sequence
  source: /note="Description of Artificial Sequence: Synthetic peptide"
GIVYSGSTYYAASVKG

SEQ ID NO: 437 - protein, 16 aa, Artificial Sequence
  source: /note="Description of Artificial Sequence: Synthetic peptide"
GIVYSGSTYYAASVKG

SEQ ID NO: 438 - protein, 16 aa, Artificial Sequence
  source: /note="Description of Artificial Sequence: Synthetic peptide"
GIVYSGSTYYAASVKG

SEQ ID NO: 439 - protein, 16 aa, Artificial Sequence
  source: /note="Description of Artificial Sequence: Synthetic peptide"
SIYYSGSAYYNPSLKS

SEQ ID NO: 440 - protein, 16 aa, Artificial Sequence
  source: /note="Description of Artificial Sequence: Synthetic peptide"
RIDWDEDKFYSTSLKT

SEQ ID NO: 441 - protein, 17 aa, Artificial Sequence
  source: /note="Description of Artificial Sequence: Synthetic peptide"
SISSSSSYIYYADSVKG

SEQ ID NO: 442 - protein, 17 aa, Artificial Sequence
  source: /note="Description of Artificial Sequence: Synthetic peptide"
YISSSGSTIYYADSVKG

SEQ ID NO: 443 - protein, 17 aa, Artificial Sequence
  source: /note="Description of Artificial Sequence: Synthetic peptide"
MINPSGGVTAYSQTLQG

SEQ ID NO: 444 - protein, 16 aa, Artificial Sequence
  source: /note="Description of Artificial Sequence: Synthetic peptide"
YIYYSGSTYYNPSLKS

SEQ ID NO: 445 - protein, 17 aa, Artificial Sequence
  source: /note="Description of Artificial Sequence: Synthetic peptide"
GIIPIFGTANYAQKFQG

SEQ ID NO: 446 - protein, 18 aa, Artificial Sequence
  source: /note="Description of Artificial Sequence: Synthetic peptide"
RTYYRSKWYSFYAISLKS

SEQ ID NO: 447 - protein, 17 aa, Artificial Sequence
  source: /note="Description of Artificial Sequence: Synthetic peptide"
AISGSGGSTYYADSVKG

SEQ ID NO: 448 - protein, 17 aa, Artificial Sequence
  source: /note="Description of Artificial Sequence: Synthetic peptide"
GISDSGVSTYYADSAKG

SEQ ID NO: 449 - protein, 17 aa, Artificial Sequence
  source: /note="Description of Artificial Sequence: Synthetic peptide"
AISGSGGSTYYADSVKG

SEQ ID NO: 450 - protein, 17 aa, Artificial Sequence
  source: /note="Description of Artificial Sequence: Synthetic peptide"
AISGSGGSTYYADSVKG

SEQ ID NO: 451 - protein, 17 aa, Artificial Sequence
  source: /note="Description of Artificial Sequence: Synthetic peptide"
GISWNSGSIGYADSVKG

SEQ ID NO: 452 - protein, 17 aa, Artificial Sequence
  source: /note="Description of Artificial Sequence: Synthetic peptide"
SINWKGNSLAYGDSVKG

SEQ ID NO: 453 - protein, 17 aa, Artificial Sequence
  source: /note="Description of Artificial Sequence: Synthetic peptide"
AISGSGGSTYYADSVKG

SEQ ID NO: 454 - protein, 17 aa, Artificial Sequence
  source: /note="Description of Artificial Sequence: Synthetic peptide"
AISGSGGSTYYADSVKG

SEQ ID NO: 455 - protein, 17 aa, Artificial Sequence
  source: /note="Description of Artificial Sequence: Synthetic peptide"
AISGSGGSTYYADSVKG

SEQ ID NO: 456 - protein, 17 aa, Artificial Sequence
  source: /note="Description of Artificial Sequence: Synthetic peptide"
AISGSGGSTYYADSVKG

SEQ ID NO: 457 - protein, 17 aa, Artificial Sequence
  source: /note="Description of Artificial Sequence: Synthetic peptide"
AISGSGGSTYYADSVKG

SEQ ID NO: 458 - protein, 17 aa, Artificial Sequence
  source: /note="Description of Artificial Sequence: Synthetic peptide"
AISGSGGSTYYADSVKG

SEQ ID NO: 459 - protein, 17 aa, Artificial Sequence
  source: /note="Description of Artificial Sequence: Synthetic peptide"
AISGSGGSTYYADSVKG

SEQ ID NO: 460 - protein, 17 aa, Artificial Sequence
  source: /note="Description of Artificial Sequence: Synthetic peptide"
WINTYTGESYFADDFKG

SEQ ID NO: 461 - protein, 17 aa, Artificial Sequence
  source: /note="Description of Artificial Sequence: Synthetic peptide"
WINTETREPAYAYDFRG

SEQ ID NO: 462 - protein, 17 aa, Artificial Sequence
  source: /note="Description of Artificial Sequence: Synthetic peptide"
RINTESGVPIYADDFKG

SEQ ID NO: 463 - protein, 17 aa, Artificial Sequence
  source: /note="Description of Artificial Sequence: Synthetic peptide"
RINTETGEPLYADDFKG

SEQ ID NO: 464 - protein, 11 aa, Artificial Sequence
  source: /note="Description of Artificial Sequence: Synthetic peptide"
SPAHYYGGMDV

SEQ ID NO: 465 - protein, 6 aa, Artificial Sequence
  source: /note="Description of Artificial Sequence: Synthetic peptide"
HSFLAY

SEQ ID NO: 466 - protein, 7 aa, Artificial Sequence
  source: /note="Description of Artificial Sequence: Synthetic peptide"
HGGESDV

SEQ ID NO: 467 - protein, 11 aa, Artificial Sequence
  source: /note="Description of Artificial Sequence: Synthetic peptide"
GPYYYQSYMDV

SEQ ID NO: 468 - protein, 14 aa, Artificial Sequence
  source: /note="Description of Artificial Sequence: Synthetic peptide"
LDSSGYYYARGPRY

SEQ ID NO: 469 - protein, 9 aa, Artificial Sequence
  source: /note="Description of Artificial Sequence: Synthetic peptide"
GPYYYYMDV

SEQ ID NO: 470 - protein, 7 aa, Artificial Sequence
  source: /note="Description of Artificial Sequence: Synthetic peptide"
HGGESDV

SEQ ID NO: 471 - protein, 7 aa, Artificial Sequence
  source: /note="Description of Artificial Sequence: Synthetic peptide"
HGGESDV

SEQ ID NO: 472 - protein, 7 aa, Artificial Sequence
  source: /note="Description of Artificial Sequence: Synthetic peptide"
HGGESDV

SEQ ID NO: 473 - protein, 8 aa, Artificial Sequence
  source: /note="Description of Artificial Sequence: Synthetic peptide"
ESGDGMDV

SEQ ID NO: 474 - protein, 7 aa, Artificial Sequence
  source: /note="Description of Artificial Sequence: Synthetic peptide"
HGGESDV

SEQ ID NO: 475 - protein, 8 aa, Artificial Sequence
  source: /note="Description of Artificial Sequence: Synthetic peptide"
STMVREDY

SEQ ID NO: 476 - protein, 7 aa, Artificial Sequence
  source: /note="Description of Artificial Sequence: Synthetic peptide"
HGGESDV

SEQ ID NO: 477 - protein, 7 aa, Artificial Sequence
  source: /note="Description of Artificial Sequence: Synthetic peptide"
HGGESDV

SEQ ID NO: 478 - protein, 7 aa, Artificial Sequence
  source: /note="Description of Artificial Sequence: Synthetic peptide"
HGGESDV

SEQ ID NO: 479 - protein, 11 aa, Artificial Sequence
  source: /note="Description of Artificial Sequence: Synthetic peptide"
HWQEWPDAFDI

SEQ ID NO: 480 - protein, 13 aa, Artificial Sequence
  source: /note="Description of Artificial Sequence: Synthetic peptide"
SGAGGTSATAFDI

SEQ ID NO: 481 - protein, 10 aa, Artificial Sequence
  source: /note="Description of Artificial Sequence: Synthetic peptide"
TIAAVYAFDI

SEQ ID NO: 482 - protein, 8 aa, Artificial Sequence
  source: /note="Description of Artificial Sequence: Synthetic peptide"
DLRGAFDI

SEQ ID NO: 483 - protein, 11 aa, Artificial Sequence
  source: /note="Description of Artificial Sequence: Synthetic peptide"
EGSGSGWYFDF

SEQ ID NO: 484 - protein, 13 aa, Artificial Sequence
  source: /note="Description of Artificial Sequence: Synthetic peptide"
AGIAARLRGAFDI

SEQ ID NO: 485 - protein, 20 aa, Artificial Sequence
  source: /note="Description of Artificial Sequence: Synthetic peptide"
RGGYQLLRWDVGLLRSAFDI

SEQ ID NO: 486 - protein, 13 aa, Artificial Sequence
  source: /note="Description of Artificial Sequence: Synthetic peptide"
SSPEGLFLYWFDP

SEQ ID NO: 487 - protein, 9 aa, Artificial Sequence
  source: /note="Description of Artificial Sequence: Synthetic peptide"
VEGSGSLDY

SEQ ID NO: 488 - protein, 9 aa, Artificial Sequence
  source: /note="Description of Artificial Sequence: Synthetic peptide"
RAGSEASDI

SEQ ID NO: 489 - protein, 15 aa, Artificial Sequence
  source: /note="Description of Artificial Sequence: Synthetic peptide"
ATYKRELRYYYGMDV

SEQ ID NO: 490 - protein, 15 aa, Artificial Sequence
  source: /note="Description of Artificial Sequence: Synthetic peptide"
ATYKRELRYYYGMDV

SEQ ID NO: 491 - protein, 8 aa, Artificial Sequence
  source: /note="Description of Artificial Sequence: Synthetic peptide"
VGKAVPDV

SEQ ID NO: 492 - protein, 13 aa, Artificial Sequence
  source: /note="Description of Artificial Sequence: Synthetic peptide"
HQGVAYYNYAMDV

SEQ ID NO: 493 - protein, 8 aa, Artificial Sequence
  source: /note="Description of Artificial Sequence: Synthetic peptide"
VVRDGMDV

SEQ ID NO: 494 - protein, 9 aa, Artificial Sequence
  source: /note="Description of Artificial Sequence: Synthetic peptide"
IPQTGTFDY

SEQ ID NO: 495 - protein, 15 aa, Artificial Sequence
  source: /note="Description of Artificial Sequence: Synthetic peptide"
ANYKRELRYYYGMDV

SEQ ID NO: 496 - protein, 11 aa, Artificial Sequence
  source: /note="Description of Artificial Sequence: Synthetic peptide"
ALVGATGAFDI

SEQ ID NO: 497 - protein, 8 aa, Artificial Sequence
  source: /note="Description of Artificial Sequence: Synthetic peptide"
WFGEGFDP

SEQ ID NO: 498 - protein, 17 aa, Artificial Sequence
  source: /note="Description of Artificial Sequence: Synthetic peptide"
VGYDSSGYYRDYYGMDV

SEQ ID NO: 499 - protein, 13 aa, Artificial Sequence
  source: /note="Description of Artificial Sequence: Synthetic peptide"
MGWSSGYLGAFDI

SEQ ID NO: 500 - protein, 13 aa, Artificial Sequence
  source: /note="Description of Artificial Sequence: Synthetic peptide"
GEIYYGYDGGFAY

SEQ ID NO: 501 - protein, 8 aa, Artificial Sequence
  source: /note="Description of Artificial Sequence: Synthetic peptide"
DYSYAMDY

SEQ ID NO: 502 - protein, 8 aa, Artificial Sequence
  source: /note="Description of Artificial Sequence: Synthetic peptide"
DYLYSLDF

SEQ ID NO: 503 - protein, 8 aa, Artificial Sequence
  source: /note="Description of Artificial Sequence: Synthetic peptide"
DYLYSCDY

SEQ ID NO: 504 - protein, 12 aa, Artificial Sequence
  source: /note="Description of Artificial Sequence: Synthetic peptide"
RASQSISSSFLA

SEQ ID NO: 505 - protein, 16 aa, Artificial Sequence
  source: /note="Description of Artificial Sequence: Synthetic peptide"
RSSQSLLHSNGYNYLD

SEQ ID NO: 506 - protein, 16 aa, Artificial Sequence
  source: /note="Description of Artificial Sequence: Synthetic peptide"
KSSQSLLRNDGKTPLY

SEQ ID NO: 507 - protein, 16 aa, Artificial Sequence
  source: /note="Description of Artificial Sequence: Synthetic peptide"
RSSQSLLHSNGYNYLN

SEQ ID NO: 508 - protein, 11 aa, Artificial Sequence
  source: /note="Description of Artificial Sequence: Synthetic peptide"
RASQSISSYLN

SEQ ID NO: 509 - protein, 16 aa, Artificial Sequence
  source: /note="Description of Artificial Sequence: Synthetic peptide"
RSSQSLLYSNGYNYVD

SEQ ID NO: 510 - protein, 11 aa, Artificial Sequence
  source: /note="Description of Artificial Sequence: Synthetic peptide"
RASQSVSSNLA

SEQ ID NO: 511 - protein, 11 aa, Artificial Sequence
  source: /note="Description of Artificial Sequence: Synthetic peptide"
RASQSVSSKLA

SEQ ID NO: 512 - protein, 12 aa, Artificial Sequence
  source: /note="Description of Artificial Sequence: Synthetic peptide"
RASQSVGSTNLA

SEQ ID NO: 513 - protein, 11 aa, Artificial Sequence
  source: /note="Description of Artificial Sequence: Synthetic peptide"
RASQSISSYLN

SEQ ID NO: 514 - protein, 11 aa, Artificial Sequence
  source: /note="Description of Artificial Sequence: Synthetic peptide"
RASQSISSYLN

SEQ ID NO: 515 - protein, 16 aa, Artificial Sequence
  source: /note="Description of Artificial Sequence: Synthetic peptide"
KSSESLVHNSGKTYLN

SEQ ID NO: 516 - protein, 11 aa, Artificial Sequence
  source: /note="Description of Artificial Sequence: Synthetic peptide"
QASEDINKFLN

SEQ ID NO: 517 - protein, 11 aa, Artificial Sequence
  source: /note="Description of Artificial Sequence: Synthetic peptide"
RASQSVGSNLA

SEQ ID NO: 518 - protein, 12 aa, Artificial Sequence
  source: /note="Description of Artificial Sequence: Synthetic peptide"
RASQSIGSSSLA

SEQ ID NO: 519 - protein, 11 aa, Artificial Sequence
  source: /note="Description of Artificial Sequence: Synthetic peptide"
KASQDIDDAMN

SEQ ID NO: 520 - protein, 11 aa, Artificial Sequence
  source: /note="Description of Artificial Sequence: Synthetic peptide"
RASQDIYNNLA

SEQ ID NO: 521 - protein, 16 aa, Artificial Sequence
  source: /note="Description of Artificial Sequence: Synthetic peptide"
RSSQSLLHSNGYNYLD

SEQ ID NO: 522 - protein, 11 aa, Artificial Sequence
  source: /note="Description of Artificial Sequence: Synthetic peptide"
GGNNIGTKSVH

SEQ ID NO: 523 - protein, 11 aa, Artificial Sequence
  source: /note="Description of Artificial Sequence: Synthetic peptide"
SGDGLSKKYVS

SEQ ID NO: 524 - protein, 11 aa, Artificial Sequence
  source: /note="Description of Artificial Sequence: Synthetic peptide"
RASQGIRNWLA

SEQ ID NO: 525 - protein, 11 aa, Artificial Sequence
  source: /note="Description of Artificial Sequence: Synthetic peptide"
GGNNIGSKSVH

SEQ ID NO: 526 - protein, 11 aa, Artificial Sequence
  source: /note="Description of Artificial Sequence: Synthetic peptide"
QGDSLGNYYAT

SEQ ID NO: 527 - protein, 12 aa, Artificial Sequence
  source: /note="Description of Artificial Sequence: Synthetic peptide"
RASQSVSSAYLA

SEQ ID NO: 528 - protein, 11 aa, Artificial Sequence
  source: /note="Description of Artificial Sequence: Synthetic peptide"
RASQSVSNSLA

SEQ ID NO: 529 - protein, 12 aa, Artificial Sequence
  source: /note="Description of Artificial Sequence: Synthetic peptide"
RASQSVSSSFLA

SEQ ID NO: 530 - protein, 12 aa, Artificial Sequence
  source: /note="Description of Artificial Sequence: Synthetic peptide"
RASQSVSTTFLA

SEQ ID NO: 531 - protein, 11 aa, Artificial Sequence
  source: /note="Description of Artificial Sequence: Synthetic peptide"
RASQSISSYLN

SEQ ID NO: 532 - protein, 12 aa, Artificial Sequence
  source: /note="Description of Artificial Sequence: Synthetic peptide"
RATQSIGSSFLA

SEQ ID NO: 533 - protein, 12 aa, Artificial Sequence
  source: /note="Description of Artificial Sequence: Synthetic peptide"
RASQSVSSSYLA

SEQ ID NO: 534 - protein, 12 aa, Artificial Sequence
  source: /note="Description of Artificial Sequence: Synthetic peptide"
RASQSVSSSYLA

SEQ ID NO: 535 - protein, 12 aa, Artificial Sequence
  source: /note="Description of Artificial Sequence: Synthetic peptide"
RASQRVASNYLA

SEQ ID NO: 536 - protein, 12 aa, Artificial Sequence
  source: /note="Description of Artificial Sequence: Synthetic peptide"
RASQSLSSNFLA

SEQ ID NO: 537 - protein, 16 aa, Artificial Sequence
  source: /note="Description of Artificial Sequence: Synthetic peptide"
RSSQSLLHSNGYNYLD

SEQ ID NO: 538 - protein, 12 aa, Artificial Sequence
  source: /note="Description of Artificial Sequence: Synthetic peptide"
RASQSVSSSYLA

SEQ ID NO: 539 - protein, 12 aa, Artificial Sequence
  source: /note="Description of Artificial Sequence: Synthetic peptide"
RASQSVASSFLA

SEQ ID NO: 540 - protein, 11 aa, Artificial Sequence
  source: /note="Description of Artificial Sequence: Synthetic peptide"
RASQDVNTAVS

SEQ ID NO: 541 - protein, 15 aa, Artificial Sequence
  source: /note="Description of Artificial Sequence: Synthetic peptide"
RASESVSVIGAHLIH

SEQ ID NO: 542 - protein, 15 aa, Artificial Sequence
  source: /note="Description of Artificial Sequence: Synthetic peptide"
RASESVTILGSHLIY

SEQ ID NO: 543 - protein, 15 aa, Artificial Sequence
  source: /note="Description of Artificial Sequence: Synthetic peptide"
RASESVTILGSHLIY

SEQ ID NO: 544 - protein, 7 aa, Artificial Sequence
  source: /note="Description of Artificial Sequence: Synthetic peptide"
GASRRAT

SEQ ID NO: 545 - protein, 7 aa, Artificial Sequence
  source: /note="Description of Artificial Sequence: Synthetic peptide"
LGSNRAS

SEQ ID NO: 546 - protein, 7 aa, Artificial Sequence
  source: /note="Description of Artificial Sequence: Synthetic peptide"
EVSNRFS

SEQ ID NO: 547 - protein, 7 aa, Artificial Sequence
  source: /note="Description of Artificial Sequence: Synthetic peptide"
LGSKRAS

SEQ ID NO: 548 - protein, 7 aa, Artificial Sequence
  source: /note="Description of Artificial Sequence: Synthetic peptide"
GASTLAS

SEQ ID NO: 549 - protein, 7 aa, Artificial Sequence
  source: /note="Description of Artificial Sequence: Synthetic peptide"
LGSNRAS

SEQ ID NO: 550 - protein, 7 aa, Artificial Sequence
  source: /note="Description of Artificial Sequence: Synthetic peptide"
GASTRAS

SEQ ID NO: 551 - protein, 7 aa, Artificial Sequence
  source: /note="Description of Artificial Sequence: Synthetic peptide"
GASIRAT

SEQ ID NO: 552 - protein, 7 aa, Artificial Sequence
  source: /note="Description of Artificial Sequence: Synthetic peptide"
DASNRAT

SEQ ID NO: 553 - protein, 7 aa, Artificial Sequence
  source: /note="Description of Artificial Sequence: Synthetic peptide"
AASSLQS

SEQ ID NO: 554 - protein, 7 aa, Artificial Sequence
  source: /note="Description of Artificial Sequence: Synthetic peptide"
AASSLQS

SEQ ID NO: 555 - protein, 7 aa, Artificial Sequence
  source: /note="Description of Artificial Sequence: Synthetic peptide"
EVSNRDS

SEQ ID NO: 556 - protein, 7 aa, Artificial Sequence
  source: /note="Description of Artificial Sequence: Synthetic peptide"
DASTLQT

SEQ ID NO: 557 - protein, 7 aa, Artificial Sequence
  source: /note="Description of Artificial Sequence: Synthetic peptide"
GASTRAT

SEQ ID NO: 558 - protein, 7 aa, Artificial Sequence
  source: /note="Description of Artificial Sequence: Synthetic peptide"
GASSRAS

SEQ ID NO: 559 - protein, 7 aa, Artificial Sequence
  source: /note="Description of Artificial Sequence: Synthetic peptide"
SATSPVP

SEQ ID NO: 560 - protein, 7 aa, Artificial Sequence
  source: /note="Description of Artificial Sequence: Synthetic peptide"
AANKSQS

SEQ ID NO: 561 - protein, 7 aa, Artificial Sequence
  source: /note="Description of Artificial Sequence: Synthetic peptide"
LGSNRAS

SEQ ID NO: 562 - protein, 7 aa, Artificial Sequence
  source: /note="Description of Artificial Sequence: Synthetic peptide"
DDSVRPS

SEQ ID NO: 563 - protein, 7 aa, Artificial Sequence
  source: /note="Description of Artificial Sequence: Synthetic peptide"
RDKERPS

SEQ ID NO: 564 - protein, 7 aa, Artificial Sequence
  source: /note="Description of Artificial Sequence: Synthetic peptide"
AASNLQS

SEQ ID NO: 565 - protein, 7 aa, Artificial Sequence
  source: /note="Description of Artificial Sequence: Synthetic peptide"
GKNNRPS

SEQ ID NO: 566 - protein, 7 aa, Artificial Sequence
  source: /note="Description of Artificial Sequence: Synthetic peptide"
GTNNRPS

SEQ ID NO: 567 - protein, 7 aa, Artificial Sequence
  source: /note="Description of Artificial Sequence: Synthetic peptide"
GASTRAT

SEQ ID NO: 568 - protein, 7 aa, Artificial Sequence
  source: /note="Description of Artificial Sequence: Synthetic peptide"
DASSRAT

SEQ ID NO: 569 - protein, 7 aa, Artificial Sequence
  source: /note="Description of Artificial Sequence: Synthetic peptide"
GASSRAT

SEQ ID NO: 570 - protein, 7 aa, Artificial Sequence
  source: /note="Description of Artificial Sequence: Synthetic peptide"
GSSNRAT

SEQ ID NO: 571 - protein, 7 aa, Artificial Sequence
  source: /note="Description of Artificial Sequence: Synthetic peptide"
AASSLQS

SEQ ID NO: 572 - protein, 7 aa, Artificial Sequence
  source: /note="Description of Artificial Sequence: Synthetic peptide"
GASQRAT

SEQ ID NO: 573 - protein, 7 aa, Artificial Sequence
  source: /note="Description of Artificial Sequence: Synthetic peptide"
GASSRAT

SEQ ID NO: 574 - protein, 7 aa, Artificial Sequence
  source: /note="Description of Artificial Sequence: Synthetic peptide"
GASSRAT

SEQ ID NO: 575 - protein, 7 aa, Artificial Sequence
  source: /note="Description of Artificial Sequence: Synthetic peptide"
GASSRAT

SEQ ID NO: 576 - protein, 7 aa, Artificial Sequence
  source: /note="Description of Artificial Sequence: Synthetic peptide"
GASNWAT

SEQ ID NO: 577 - protein, 7 aa, Artificial Sequence
  source: /note="Description of Artificial Sequence: Synthetic peptide"
LGSNRAS

SEQ ID NO: 578 - protein, 7 aa, Artificial Sequence
  source: /note="Description of Artificial Sequence: Synthetic peptide"
GTSSRAT

SEQ ID NO: 579 - protein, 7 aa, Artificial Sequence
  source: /note="Description of Artificial Sequence: Synthetic peptide"
GASGRAT

SEQ ID NO: 580 - protein, 7 aa, Artificial Sequence
  source: /note="Description of Artificial Sequence: Synthetic peptide"
SASYRYT

SEQ ID NO: 581 - protein, 7 aa, Artificial Sequence
  source: /note="Description of Artificial Sequence: Synthetic peptide"
LASNLET

SEQ ID NO: 582 - protein, 7 aa, Artificial Sequence
  source: /note="Description of Artificial Sequence: Synthetic peptide"
LASNVQT

SEQ ID NO: 583 - protein, 7 aa, Artificial Sequence
  source: /note="Description of Artificial Sequence: Synthetic peptide"
LASNVQT

SEQ ID NO: 584 - protein, 10 aa, Artificial Sequence
  source: /note="Description of Artificial Sequence: Synthetic peptide"
QQYHSSPSWT

SEQ ID NO: 585 - protein, 9 aa, Artificial Sequence
  source: /note="Description of Artificial Sequence: Synthetic peptide"
MQALQTPYT

SEQ ID NO: 586 - protein, 8 aa, Artificial Sequence
  source: /note="Description of Artificial Sequence: Synthetic peptide"
MQNIQFPS

SEQ ID NO: 587 - protein, 9 aa, Artificial Sequence
  source: /note="Description of Artificial Sequence: Synthetic peptide"
MQALQTPYT

SEQ ID NO: 588 - protein, 8 aa, Artificial Sequence
  source: /note="Description of Artificial Sequence: Synthetic peptide"
QQSYKRAS

SEQ ID NO: 589 - protein, 9 aa, Artificial Sequence
  source: /note="Description of Artificial Sequence: Synthetic peptide"
MQGRQFPYS

SEQ ID NO: 590 - protein, 8 aa, Artificial Sequence
  source: /note="Description of Artificial Sequence: Synthetic peptide"
QQYGSSLT

SEQ ID NO: 591 - protein, 9 aa, Artificial Sequence
  source: /note="Description of Artificial Sequence: Synthetic peptide"
QQYGSSSWT

SEQ ID NO: 592 - protein, 10 aa, Artificial Sequence
  source: /note="Description of Artificial Sequence: Synthetic peptide"
QQYGSSPPWT

SEQ ID NO: 593 - protein, 7 aa, Artificial Sequence
  source: /note="Description of Artificial Sequence: Synthetic peptide"
QQSYTLA

SEQ ID NO: 594 - protein, 9 aa, Artificial Sequence
  source: /note="Description of Artificial Sequence: Synthetic peptide"
QQSYSTPYT

SEQ ID NO: 595 - protein, 9 aa, Artificial Sequence
  source: /note="Description of Artificial Sequence: Synthetic peptide"
MQGTHWPGT

SEQ ID NO: 596 - protein, 9 aa, Artificial Sequence
  source: /note="Description of Artificial Sequence: Synthetic peptide"
QQYESLPLT

SEQ ID NO: 597 - protein, 10 aa, Artificial Sequence
  source: /note="Description of Artificial Sequence: Synthetic peptide"
QQYNDWLPVT

SEQ ID NO: 598 - protein, 10 aa, Artificial Sequence
  source: /note="Description of Artificial Sequence: Synthetic peptide"
QQYAGSPPFT

SEQ ID NO: 599 - protein, 9 aa, Artificial Sequence
  source: /note="Description of Artificial Sequence: Synthetic peptide"
LQHDNFPLT

SEQ ID NO: 600 - protein, 9 aa, Artificial Sequence
  source: /note="Description of Artificial Sequence: Synthetic peptide"
QHYYRFPYS

SEQ ID NO: 601 - protein, 9 aa, Artificial Sequence
  source: /note="Description of Artificial Sequence: Synthetic peptide"
MQALQTPYT

SEQ ID NO: 602 - protein, 11 aa, Artificial Sequence
  source: /note="Description of Artificial Sequence: Synthetic peptide"
QVWDSDSEHVV

SEQ ID NO: 603 - protein, 9 aa, Artificial Sequence
  source: /note="Description of Artificial Sequence: Synthetic peptide"
QAWDDTTVV

SEQ ID NO: 604 - protein, 9 aa, Artificial Sequence
  source: /note="Description of Artificial Sequence: Synthetic peptide"
QKYNSAPFT

SEQ ID NO: 605 - protein, 12 aa, Artificial Sequence
  source: /note="Description of Artificial Sequence: Synthetic peptide"
SSRDSSGDHLRV

SEQ ID NO: 606 - protein, 11 aa, Artificial Sequence
  source: /note="Description of Artificial Sequence: Synthetic peptide"
NSRDSSGHHLL

SEQ ID NO: 607 - protein, 14 aa, Artificial Sequence
  source: /note="Description of Artificial Sequence: Synthetic peptide"
QHYGSSFNGSSLFT

SEQ ID NO: 608 - protein, 10 aa, Artificial Sequence
  source: /note="Description of Artificial Sequence: Synthetic peptide"
QQFGTSSGLT

SEQ ID NO: 609 - protein, 10 aa, Artificial Sequence
  source: /note="Description of Artificial Sequence: Synthetic peptide"
QQYHSSPSWT

SEQ ID NO: 610 - protein, 10 aa, Artificial Sequence
  source: /note="Description of Artificial Sequence: Synthetic peptide"
QQYHSSPSWT

SEQ ID NO: 611 - protein, 9 aa, Artificial Sequence
  source: /note="Description of Artificial Sequence: Synthetic peptide"
QQSYSTPYS

SEQ ID NO: 612 - protein, 10 aa, Artificial Sequence
  source: /note="Description of Artificial Sequence: Synthetic peptide"
QHYESSPSWT

SEQ ID NO: 613 - protein, 10 aa, Artificial Sequence
  source: /note="Description of Artificial Sequence: Synthetic peptide"
QQYGSPPRFT

SEQ ID NO: 614 - protein, 10 aa, Artificial Sequence
  source: /note="Description of Artificial Sequence: Synthetic peptide"
QHYGSSPSWT

SEQ ID NO: 615 - protein, 10 aa, Artificial Sequence
  source: /note="Description of Artificial Sequence: Synthetic peptide"
QHYDSSPSWT

SEQ ID NO: 616 - protein, 10 aa, Artificial Sequence
  source: /note="Description of Artificial Sequence: Synthetic peptide"
QYYGTSPMYT

SEQ ID NO: 617 - protein, 9 aa, Artificial Sequence
  source: /note="Description of Artificial Sequence: Synthetic peptide"
MQALQTPLT

SEQ ID NO: 618 - protein, 11 aa, Artificial Sequence
  source: /note="Description of Artificial Sequence: Synthetic peptide"
QHYGNSPPKFT

SEQ ID NO: 619 - protein, 10 aa, Artificial Sequence
  source: /note="Description of Artificial Sequence: Synthetic peptide"
QHYGGSPRLT

SEQ ID NO: 620 - protein, 9 aa, Artificial Sequence
  source: /note="Description of Artificial Sequence: Synthetic peptide"
QQHYSTPWT

SEQ ID NO: 621 - protein, 9 aa, Artificial Sequence
  source: /note="Description of Artificial Sequence: Synthetic peptide"
LQSRIFPRT

SEQ ID NO: 622 - protein, 9 aa, Artificial Sequence
  source: /note="Description of Artificial Sequence: Synthetic peptide"
LQSRTIPRT

SEQ ID NO: 623 - protein, 9 aa, Artificial Sequence
  source: /note="Description of Artificial Sequence: Synthetic peptide"
LQSRTIPRT

SEQ ID NO: 624 - protein, 7 aa, Artificial Sequence
  source: /note="Description of Artificial Sequence: Synthetic peptide"
GFTFSNY

SEQ ID NO: 625 - protein, 7 aa, Artificial Sequence
  source: /note="Description of Artificial Sequence: Synthetic peptide"
GFTFDDY

SEQ ID NO: 626 - protein, 7 aa, Artificial Sequence
  source: /note="Description of Artificial Sequence: Synthetic peptide"
GFALSNH

SEQ ID NO: 627 - protein, 7 aa, Artificial Sequence
  source: /note="Description of Artificial Sequence: Synthetic peptide"
GYIFDNF

SEQ ID NO: 628 - protein, 7 aa, Artificial Sequence
  source: /note="Description of Artificial Sequence: Synthetic peptide"
GFTFSSD

SEQ ID NO: 629 - protein, 7 aa, Artificial Sequence
  source: /note="Description of Artificial Sequence: Synthetic peptide"
GYTFSNY

SEQ ID NO: 630 - protein, 7 aa, Artificial Sequence
  source: /note="Description of Artificial Sequence: Synthetic peptide"
GFALSNH

SEQ ID NO: 631 - protein, 7 aa, Artificial Sequence
  source: /note="Description of Artificial Sequence: Synthetic peptide"
GFALSNH

SEQ ID NO: 632 - protein, 7 aa, Artificial Sequence
  source: /note="Description of Artificial Sequence: Synthetic peptide"
GFALSNH

SEQ ID NO: 633 - protein, 7 aa, Artificial Sequence
  source: /note="Description of Artificial Sequence: Synthetic peptide"
GFTFSDY

SEQ ID NO: 634 - protein, 7 aa, Artificial Sequence
  source: /note="Description of Artificial Sequence: Synthetic peptide"
GFALSNH

SEQ ID NO: 635 - protein, 7 aa, Artificial Sequence
  source: /note="Description of Artificial Sequence: Synthetic peptide"
GFTFSDY

SEQ ID NO: 636 - protein, 7 aa, Artificial Sequence
  source: /note="Description of Artificial Sequence: Synthetic peptide"
GFALSNH

SEQ ID NO: 637 - protein, 7 aa, Artificial Sequence
  source: /note="Description of Artificial Sequence: Synthetic peptide"
GFALSNH

SEQ ID NO: 638 - protein, 7 aa, Artificial Sequence
  source: /note="Description of Artificial Sequence: Synthetic peptide"
GFALSNH

SEQ ID NO: 639 - protein, 9 aa, Artificial Sequence
  source: /note="Description of Artificial Sequence: Synthetic peptide"
GGSISSSYY

SEQ ID NO: 640 - protein, 9 aa, Artificial Sequence
  source: /note="Description of Artificial Sequence: Synthetic peptide"
GFSLRTSGM

SEQ ID NO: 641 - protein, 7 aa, Artificial Sequence
  source: /note="Description of Artificial Sequence: Synthetic peptide"
GFTFSSY

SEQ ID NO: 642 - protein, 7 aa, Artificial Sequence
  source: /note="Description of Artificial Sequence: Synthetic peptide"
GFTFSDY

SEQ ID NO: 643 - protein, 7 aa, Artificial Sequence
  source: /note="Description of Artificial Sequence: Synthetic peptide"
GYTVTSH

SEQ ID NO: 644 - protein, 9 aa, Artificial Sequence
  source: /note="Description of Artificial Sequence: Synthetic peptide"
GGSISSGGY

SEQ ID NO: 645 - protein, 7 aa, Artificial Sequence
  source: /note="Description of Artificial Sequence: Synthetic peptide"
GGTFSSY

SEQ ID NO: 646 - protein, 9 aa, Artificial Sequence
  source: /note="Description of Artificial Sequence: Synthetic peptide"
GDSVSSNSA

SEQ ID NO: 647 - protein, 7 aa, Artificial Sequence
  source: /note="Description of Artificial Sequence: Synthetic peptide"
GFTFSSY

SEQ ID NO: 648 - protein, 7 aa, Artificial Sequence
  source: /note="Description of Artificial Sequence: Synthetic peptide"
GITFSRY

SEQ ID NO: 649 - protein, 7 aa, Artificial Sequence
  source: /note="Description of Artificial Sequence: Synthetic peptide"
GFTFSSY

SEQ ID NO: 650 - protein, 7 aa, Artificial Sequence
  source: /note="Description of Artificial Sequence: Synthetic peptide"
GFTFSSY

SEQ ID NO: 651 - protein, 7 aa, Artificial Sequence
  source: /note="Description of Artificial Sequence: Synthetic peptide"
GFTFDDY

SEQ ID NO: 652 - protein, 7 aa, Artificial Sequence
  source: /note="Description of Artificial Sequence: Synthetic peptide"
GFTFDDY

SEQ ID NO: 653 - protein, 7 aa, Artificial Sequence
  source: /note="Description of Artificial Sequence: Synthetic peptide"
GFTFSSY

SEQ ID NO: 654 - protein, 7 aa, Artificial Sequence
  source: /note="Description of Artificial Sequence: Synthetic peptide"
GFTFSSY

SEQ ID NO: 655 - protein, 7 aa, Artificial Sequence
  source: /note="Description of Artificial Sequence: Synthetic peptide"
GFTFSSY

SEQ ID NO: 656 - protein, 7 aa, Artificial Sequence
  source: /note="Description of Artificial Sequence: Synthetic peptide"
GFSFSSY

SEQ ID NO: 657 - protein, 7 aa, Artificial Sequence
  source: /note="Description of Artificial Sequence: Synthetic peptide"
GFTFSSY

SEQ ID NO: 658 - protein, 7 aa, Artificial Sequence
  source: /note="Description of Artificial Sequence: Synthetic peptide"
GFTFSSY

SEQ ID NO: 659 - protein, 7 aa, Artificial Sequence
  source: /note="Description of Artificial Sequence: Synthetic peptide"
GFTFSSY

SEQ ID NO: 660 - protein, 7 aa, Artificial Sequence
  source: /note="Description of Artificial Sequence: Synthetic peptide"
GYTFTNF

SEQ ID NO: 661 - protein, 7 aa, Artificial Sequence
  source: /note="Description of Artificial Sequence: Synthetic peptide"
GYTFTDY

SEQ ID NO: 662 - protein, 7 aa, Artificial Sequence
  source: /note="Description of Artificial Sequence: Synthetic peptide"
GYTFRHY

SEQ ID NO: 663 - protein, 7 aa, Artificial Sequence
  source: /note="Description of Artificial Sequence: Synthetic peptide"
GYTFTHY

SEQ ID NO: 664 - protein, 6 aa, Artificial Sequence
  source: /note="Description of Artificial Sequence: Synthetic peptide"
SRSGEN

SEQ ID NO: 665 - protein, 6 aa, Artificial Sequence
  source: /note="Description of Artificial Sequence: Synthetic peptide"
SWNSGS

SEQ ID NO: 666 - protein, 5 aa, Artificial Sequence
  source: /note="Description of Artificial Sequence: Synthetic peptide"
VYSGS

SEQ ID NO: 667 - protein, 6 aa, Artificial Sequence
  source: /note="Description of Artificial Sequence: Synthetic peptide"
NPKNNN

SEQ ID NO: 668 - protein, 6 aa, Artificial Sequence
  source: /note="Description of Artificial Sequence: Synthetic peptide"
SGSGGT

SEQ ID NO: 669 - protein, 6 aa, Artificial Sequence
  source: /note="Description of Artificial Sequence: Synthetic peptide"
SAYNGN

SEQ ID NO: 670 - protein, 5 aa, Artificial Sequence
  source: /note="Description of Artificial Sequence: Synthetic peptide"
VYSGS

SEQ ID NO: 671 - protein, 5 aa, Artificial Sequence
  source: /note="Description of Artificial Sequence: Synthetic peptide"
VYSGS

SEQ ID NO: 672 - protein, 5 aa, Artificial Sequence
  source: /note="Description of Artificial Sequence: Synthetic peptide"
VYSGS

SEQ ID NO: 673 - protein, 6 aa, Artificial Sequence
  source: /note="Description of Artificial Sequence: Synthetic peptide"
SSSGST

SEQ ID NO: 674 - protein, 5 aa, Artificial Sequence
  source: /note="Description of Artificial Sequence: Synthetic peptide"
VYSGS

SEQ ID NO: 675 - protein, 6 aa, Artificial Sequence
  source: /note="Description of Artificial Sequence: Synthetic peptide"
SSSGNT

SEQ ID NO: 676 - protein, 5 aa, Artificial Sequence
  source: /note="Description of Artificial Sequence: Synthetic peptide"
VYSGS

SEQ ID NO: 677 - protein, 5 aa, Artificial Sequence
  source: /note="Description of Artificial Sequence: Synthetic peptide"
VYSGS

SEQ ID NO: 678 - protein, 5 aa, Artificial Sequence
  source: /note="Description of Artificial Sequence: Synthetic peptide"
VYSGS

SEQ ID NO: 679 - protein, 5 aa, Artificial Sequence
  source: /note="Description of Artificial Sequence: Synthetic peptide"
YYSGS

SEQ ID NO: 680 - protein, 5 aa, Artificial Sequence
  source: /note="Description of Artificial Sequence: Synthetic peptide"
DWDED

SEQ ID NO: 681 - protein, 6 aa, Artificial Sequence
  source: /note="Description of Artificial Sequence: Synthetic peptide"
SSSSSY

SEQ ID NO: 682 - protein, 6 aa, Artificial Sequence
  source: /note="Description of Artificial Sequence: Synthetic peptide"
SSSGST

SEQ ID NO: 683 - protein, 6 aa, Artificial Sequence
  source: /note="Description of Artificial Sequence: Synthetic peptide"
NPSGGV

SEQ ID NO: 684 - protein, 5 aa, Artificial Sequence
  source: /note="Description of Artificial Sequence: Synthetic peptide"
YYSGS

SEQ ID NO: 685 - protein, 6 aa, Artificial Sequence
  source: /note="Description of Artificial Sequence: Synthetic peptide"
IPIFGT

SEQ ID NO: 686 - protein, 7 aa, Artificial Sequence
  source: /note="Description of Artificial Sequence: Synthetic peptide"
YYRSKWY

SEQ ID NO: 687 - protein, 6 aa, Artificial Sequence
  source: /note="Description of Artificial Sequence: Synthetic peptide"
SGSGGS

SEQ ID NO: 688 - protein, 6 aa, Artificial Sequence
  source: /note="Description of Artificial Sequence: Synthetic peptide"
SDSGVS

SEQ ID NO: 689 - protein, 6 aa, Artificial Sequence
  source: /note="Description of Artificial Sequence: Synthetic peptide"
SGSGGS

SEQ ID NO: 690 - protein, 6 aa, Artificial Sequence
  source: /note="Description of Artificial Sequence: Synthetic peptide"
SGSGGS

SEQ ID NO: 691 - protein, 6 aa, Artificial Sequence
  source: /note="Description of Artificial Sequence: Synthetic peptide"
SWNSGS

SEQ ID NO: 692 - protein, 6 aa, Artificial Sequence
  source: /note="Description of Artificial Sequence: Synthetic peptide"
NWKGNS

SEQ ID NO: 693 - protein, 6 aa, Artificial Sequence
  source: /note="Description of Artificial Sequence: Synthetic peptide"
SGSGGS

SEQ ID NO: 694 - protein, 6 aa, Artificial Sequence
  source: /note="Description of Artificial Sequence: Synthetic peptide"
SGSGGS

SEQ ID NO: 695 - protein, 6 aa, Artificial Sequence
  source: /note="Description of Artificial Sequence: Synthetic peptide"
SGSGGS

SEQ ID NO: 696 - protein, 6 aa, Artificial Sequence
  source: /note="Description of Artificial Sequence: Synthetic peptide"
SGSGGS

SEQ ID NO: 697 - protein, 6 aa, Artificial Sequence
  source: /note="Description of Artificial Sequence: Synthetic peptide"
SGSGGS

SEQ ID NO: 698 - protein, 6 aa, Artificial Sequence
  source: /note="Description of Artificial Sequence: Synthetic peptide"
SGSGGS

SEQ ID NO: 699 - protein, 6 aa, Artificial Sequence
  source: /note="Description of Artificial Sequence: Synthetic peptide"
SGSGGS

SEQ ID NO: 700 - protein, 6 aa, Artificial Sequence
  source: /note="Description of Artificial Sequence: Synthetic peptide"
NTYTGE

SEQ ID NO: 701 - protein, 6 aa, Artificial Sequence
  source: /note="Description of Artificial Sequence: Synthetic peptide"
NTETRE

SEQ ID NO: 702 - protein, 6 aa, Artificial Sequence
  source: /note="Description of Artificial Sequence: Synthetic peptide"
NTESGV

SEQ ID NO: 703 - protein, 6 aa, Artificial Sequence
  source: /note="Description of Artificial Sequence: Synthetic peptide"
NTETGE

SEQ ID NO: 704 - protein, 11 aa, Artificial Sequence
  source: /note="Description of Artificial Sequence: Synthetic peptide"
SPAHYYGGMDV

SEQ ID NO: 705 - protein, 6 aa, Artificial Sequence
  source: /note="Description of Artificial Sequence: Synthetic peptide"
HSFLAY

SEQ ID NO: 706 - protein, 7 aa, Artificial Sequence
  source: /note="Description of Artificial Sequence: Synthetic peptide"
HGGESDV

SEQ ID NO: 707 - protein, 11 aa, Artificial Sequence
  source: /note="Description of Artificial Sequence: Synthetic peptide"
GPYYYQSYMDV

SEQ ID NO: 708 - protein, 14 aa, Artificial Sequence
  source: /note="Description of Artificial Sequence: Synthetic peptide"
LDSSGYYYARGPRY

SEQ ID NO: 709 - protein, 9 aa, Artificial Sequence
  source: /note="Description of Artificial Sequence: Synthetic peptide"
GPYYYYMDV

SEQ ID NO: 710 - protein, 7 aa, Artificial Sequence
  source: /note="Description of Artificial Sequence: Synthetic peptide"
HGGESDV

SEQ ID NO: 711 - protein, 7 aa, Artificial Sequence
  source: /note="Description of Artificial Sequence: Synthetic peptide"
HGGESDV

SEQ ID NO: 712 - protein, 7 aa, Artificial Sequence
  source: /note="Description of Artificial Sequence: Synthetic peptide"
HGGESDV

SEQ ID NO: 713 - protein, 8 aa, Artificial Sequence
  source: /note="Description of Artificial Sequence: Synthetic peptide"
ESGDGMDV

SEQ ID NO: 714 - protein, 7 aa, Artificial Sequence
  source: /note="Description of Artificial Sequence: Synthetic peptide"
HGGESDV

SEQ ID NO: 715 - protein, 8 aa, Artificial Sequence
  source: /note="Description of Artificial Sequence: Synthetic peptide"
STMVREDY

SEQ ID NO: 716 - protein, 7 aa, Artificial Sequence
  source: /note="Description of Artificial Sequence: Synthetic peptide"
HGGESDV

SEQ ID NO: 717 - protein, 7 aa, Artificial Sequence
  source: /note="Description of Artificial Sequence: Synthetic peptide"
HGGESDV

SEQ ID NO: 718 - protein, 7 aa, Artificial Sequence
  source: /note="Description of Artificial Sequence: Synthetic peptide"
HGGESDV

SEQ ID NO: 719 - protein, 11 aa, Artificial Sequence
  source: /note="Description of Artificial Sequence: Synthetic peptide"
HWQEWPDAFDI

SEQ ID NO: 720 - protein, 13 aa, Artificial Sequence
  source: /note="Description of Artificial Sequence: Synthetic peptide"
SGAGGTSATAFDI

SEQ ID NO: 721 - protein, 10 aa, Artificial Sequence
  source: /note="Description of Artificial Sequence: Synthetic peptide"
TIAAVYAFDI

SEQ ID NO: 722 - protein, 8 aa, Artificial Sequence
  source: /note="Description of Artificial Sequence: Synthetic peptide"
DLRGAFDI

SEQ ID NO: 723 - protein, 11 aa, Artificial Sequence
  source: /note="Description of Artificial Sequence: Synthetic peptide"
EGSGSGWYFDF

SEQ ID NO: 724 - protein, 13 aa, Artificial Sequence
  source: /note="Description of Artificial Sequence: Synthetic peptide"
AGIAARLRGAFDI

SEQ ID NO: 725 - protein, 20 aa, Artificial Sequence
  source: /note="Description of Artificial Sequence: Synthetic peptide"
RGGYQLLRWDVGLLRSAFDI

SEQ ID NO: 726 - protein, 13 aa, Artificial Sequence
  source: /note="Description of Artificial Sequence: Synthetic peptide"
SSPEGLFLYWFDP

SEQ ID NO: 727 - protein, 9 aa, Artificial Sequence
  source: /note="Description of Artificial Sequence: Synthetic peptide"
VEGSGSLDY

SEQ ID NO: 728 - protein, 9 aa, Artificial Sequence
  source: /note="Description of Artificial Sequence: Synthetic peptide"
RAGSEASDI

SEQ ID NO: 729 - protein, 15 aa, Artificial Sequence
  source: /note="Description of Artificial Sequence: Synthetic peptide"
ATYKRELRYYYGMDV

SEQ ID NO: 730 - protein, 15 aa, Artificial Sequence
  source: /note="Description of Artificial Sequence: Synthetic peptide"
ATYKRELRYYYGMDV

SEQ ID NO: 731 - protein, 8 aa, Artificial Sequence
  source: /note="Description of Artificial Sequence: Synthetic peptide"
VGKAVPDV

SEQ ID NO: 732 - protein, 13 aa, Artificial Sequence
  source: /note="Description of Artificial Sequence: Synthetic peptide"
HQGVAYYNYAMDV

SEQ ID NO: 733 - protein, 8 aa, Artificial Sequence
  source: /note="Description of Artificial Sequence: Synthetic peptide"
VVRDGMDV

SEQ ID NO: 734 - protein, 9 aa, Artificial Sequence
  source: /note="Description of Artificial Sequence: Synthetic peptide"
IPQTGTFDY

SEQ ID NO: 735 - protein, 15 aa, Artificial Sequence
  source: /note="Description of Artificial Sequence: Synthetic peptide"
ANYKRELRYYYGMDV

SEQ ID NO: 736 - protein, 11 aa, Artificial Sequence
  source: /note="Description of Artificial Sequence: Synthetic peptide"
ALVGATGAFDI

SEQ ID NO: 737 - protein, 8 aa, Artificial Sequence
  source: /note="Description of Artificial Sequence: Synthetic peptide"
WFGEGFDP

SEQ ID NO: 738 - protein, 17 aa, Artificial Sequence
  source: /note="Description of Artificial Sequence: Synthetic peptide"
VGYDSSGYYRDYYGMDV

SEQ ID NO: 739 - protein, 13 aa, Artificial Sequence
  source: /note="Description of Artificial Sequence: Synthetic peptide"
MGWSSGYLGAFDI

SEQ ID NO: 740 - protein, 13 aa, Artificial Sequence
  source: /note="Description of Artificial Sequence: Synthetic peptide"
GEIYYGYDGGFAY

SEQ ID NO: 741 - protein, 8 aa, Artificial Sequence
  source: /note="Description of Artificial Sequence: Synthetic peptide"
DYSYAMDY

SEQ ID NO: 742 - protein, 8 aa, Artificial Sequence
  source: /note="Description of Artificial Sequence: Synthetic peptide"
DYLYSLDF

SEQ ID NO: 743 - protein, 8 aa, Artificial Sequence
  source: /note="Description of Artificial Sequence: Synthetic peptide"
DYLYSCDY

SEQ ID NO: 744 - protein, 8 aa, Artificial Sequence
  source: /note="Description of Artificial Sequence: Synthetic peptide"
SQSISSSF

SEQ ID NO: 745 - protein, 12 aa, Artificial Sequence
  source: /note="Description of Artificial Sequence: Synthetic peptide"
SQSLLHSNGYNY

SEQ ID NO: 746 - protein, 12 aa, Artificial Sequence
  source: /note="Description of Artificial Sequence: Synthetic peptide"
SQSLLRNDGKTP

SEQ ID NO: 747 - protein, 12 aa, Artificial Sequence
  source: /note="Description of Artificial Sequence: Synthetic peptide"
SQSLLHSNGYNY

SEQ ID NO: 748 - protein, 7 aa, Artificial Sequence
  source: /note="Description of Artificial Sequence: Synthetic peptide"
SQSISSY

SEQ ID NO: 749 - protein, 12 aa, Artificial Sequence
  source: /note="Description of Artificial Sequence: Synthetic peptide"
SQSLLYSNGYNY

SEQ ID NO: 750 - protein, 7 aa, Artificial Sequence
  source: /note="Description of Artificial Sequence: Synthetic peptide"
SQSVSSN

SEQ ID NO: 751 - protein, 7 aa, Artificial Sequence
  source: /note="Description of Artificial Sequence: Synthetic peptide"
SQSVSSK

SEQ ID NO: 752 - protein, 8 aa, Artificial Sequence
  source: /note="Description of Artificial Sequence: Synthetic peptide"
SQSVGSTN

SEQ ID NO: 753 - protein, 7 aa, Artificial Sequence
  source: /note="Description of Artificial Sequence: Synthetic peptide"
SQSISSY

SEQ ID NO: 754 - protein, 7 aa, Artificial Sequence
  source: /note="Description of Artificial Sequence: Synthetic peptide"
SQSISSY

SEQ ID NO: 755 - protein, 12 aa, Artificial Sequence
  source: /note="Description of Artificial Sequence: Synthetic peptide"
SESLVHNSGKTY

SEQ ID NO: 756 - protein, 7 aa, Artificial Sequence
  source: /note="Description of Artificial Sequence: Synthetic peptide"
SEDINKF

SEQ ID NO: 757 - protein, 7 aa, Artificial Sequence
  source: /note="Description of Artificial Sequence: Synthetic peptide"
SQSVGSN

SEQ ID NO: 758 - protein, 8 aa, Artificial Sequence
  source: /note="Description of Artificial Sequence: Synthetic peptide"
SQSIGSSS

SEQ ID NO: 759 - protein, 7 aa, Artificial Sequence
  source: /note="Description of Artificial Sequence: Synthetic peptide"
SQDIDDA

SEQ ID NO: 760 - protein, 7 aa, Artificial Sequence
  source: /note="Description of Artificial Sequence: Synthetic peptide"
SQDIYNN

SEQ ID NO: 761 - protein, 12 aa, Artificial Sequence
  source: /note="Description of Artificial Sequence: Synthetic peptide"
SQSLLHSNGYNY

SEQ ID NO: 762 - protein, 7 aa, Artificial Sequence
  source: /note="Description of Artificial Sequence: Synthetic peptide"
NNIGTKS

SEQ ID NO: 763 - protein, 7 aa, Artificial Sequence
  source: /note="Description of Artificial Sequence: Synthetic peptide"
DGLSKKY

SEQ ID NO: 764 - protein, 7 aa, Artificial Sequence
  source: /note="Description of Artificial Sequence: Synthetic peptide"
SQGIRNW

SEQ ID NO: 765 - protein, 7 aa, Artificial Sequence
  source: /note="Description of Artificial Sequence: Synthetic peptide"
NNIGSKS

SEQ ID NO: 766 - protein, 7 aa, Artificial Sequence
  source: /note="Description of Artificial Sequence: Synthetic peptide"
DSLGNYY

SEQ ID NO: 767 - protein, 8 aa, Artificial Sequence
  source: /note="Description of Artificial Sequence: Synthetic peptide"
SQSVSSAY

SEQ ID NO: 768 - protein, 7 aa, Artificial Sequence
  source: /note="Description of Artificial Sequence: Synthetic peptide"
SQSVSNS

SEQ ID NO: 769 - protein, 8 aa, Artificial Sequence
  source: /note="Description of Artificial Sequence: Synthetic peptide"
SQSVSSSF

SEQ ID NO: 770 - protein, 8 aa, Artificial Sequence
  source: /note="Description of Artificial Sequence: Synthetic peptide"
SQSVSTTF

SEQ ID NO: 771 - protein, 7 aa, Artificial Sequence
  source: /note="Description of Artificial Sequence: Synthetic peptide"
SQSISSY

SEQ ID NO: 772 - protein, 8 aa, Artificial Sequence
  source: /note="Description of Artificial Sequence: Synthetic peptide"
TQSIGSSF

SEQ ID NO: 773 - protein, 8 aa, Artificial Sequence
  source: /note="Description of Artificial Sequence: Synthetic peptide"
SQSVSSSY

SEQ ID NO: 774 - protein, 8 aa, Artificial Sequence
  source: /note="Description of Artificial Sequence: Synthetic peptide"
SQSVSSSY

SEQ ID NO: 775 - protein, 8 aa, Artificial Sequence
  source: /note="Description of Artificial Sequence: Synthetic peptide"
SQRVASNY

SEQ ID NO: 776 - protein, 8 aa, Artificial Sequence
  source: /note="Description of Artificial Sequence: Synthetic peptide"
SQSLSSNF

SEQ ID NO: 777 - protein, 12 aa, Artificial Sequence
  source: /note="Description of Artificial Sequence: Synthetic peptide"
SQSLLHSNGYNY

SEQ ID NO: 778 - protein, 8 aa, Artificial Sequence
  source: /note="Description of Artificial Sequence: Synthetic peptide"
SQSVSSSY

SEQ ID NO: 779 - protein, 8 aa, Artificial Sequence
  source: /note="Description of Artificial Sequence: Synthetic peptide"
SQSVASSF

SEQ ID NO: 780 - protein, 7 aa, Artificial Sequence
  source: /note="Description of Artificial Sequence: Synthetic peptide"
SQDVNTA

SEQ ID NO: 781 - protein, 11 aa, Artificial Sequence
  source: /note="Description of Artificial Sequence: Synthetic peptide"
SESVSVIGAHL

SEQ ID NO: 782 - protein, 11 aa, Artificial Sequence
  source: /note="Description of Artificial Sequence: Synthetic peptide"
SESVTILGSHL

SEQ ID NO: 783 - protein, 11 aa, Artificial Sequence
  source: /note="Description of Artificial Sequence: Synthetic peptide"
SESVTILGSHL

SEQ ID NO: 784 - protein, 3 aa, Artificial Sequence
  source: /note="Description of Artificial Sequence: Synthetic peptide"
GAS

SEQ ID NO: 785 - protein, 3 aa, Artificial Sequence
  source: /note="Description of Artificial Sequence: Synthetic peptide"
LGS

SEQ ID NO: 786 - protein, 3 aa, Artificial Sequence
  source: /note="Description of Artificial Sequence: Synthetic peptide"
EVS

SEQ ID NO: 787 - protein, 3 aa, Artificial Sequence
  source: /note="Description of Artificial Sequence: Synthetic peptide"
LGS

SEQ ID NO: 788 - protein, 3 aa, Artificial Sequence
  source: /note="Description of Artificial Sequence: Synthetic peptide"
GAS

SEQ ID NO: 789 - protein, 3 aa, Artificial Sequence
  source: /note="Description of Artificial Sequence: Synthetic peptide"
LGS

SEQ ID NO: 790 - protein, 3 aa, Artificial Sequence
  source: /note="Description of Artificial Sequence: Synthetic peptide"
GAS

SEQ ID NO: 791 - protein, 3 aa, Artificial Sequence
  source: /note="Description of Artificial Sequence: Synthetic peptide"
GAS

SEQ ID NO: 792 - protein, 3 aa, Artificial Sequence
  source: /note="Description of Artificial Sequence: Synthetic peptide"
DAS

SEQ ID NO: 793 - protein, 3 aa, Artificial Sequence
  source: /note="Description of Artificial Sequence: Synthetic peptide"
AAS

SEQ ID NO: 794 - protein, 3 aa, Artificial Sequence
  source: /note="Description of Artificial Sequence: Synthetic peptide"
AAS

SEQ ID NO: 795 - protein, 3 aa, Artificial Sequence
  source: /note="Description of Artificial Sequence: Synthetic peptide"
EVS

SEQ ID NO: 796 - protein, 3 aa, Artificial Sequence
  source: /note="Description of Artificial Sequence: Synthetic peptide"
DAS

SEQ ID NO: 797 - protein, 3 aa, Artificial Sequence
  source: /note="Description of Artificial Sequence: Synthetic peptide"
GAS

SEQ ID NO: 798 - protein, 3 aa, Artificial Sequence
  source: /note="Description of Artificial Sequence: Synthetic peptide"
GAS

SEQ ID NO: 799 - protein, 3 aa, Artificial Sequence
  source: /note="Description of Artificial Sequence: Synthetic peptide"
SAT

SEQ ID NO: 800 - protein, 3 aa, Artificial Sequence
  source: /note="Description of Artificial Sequence: Synthetic peptide"
AAN

SEQ ID NO: 801 - protein, 3 aa, Artificial Sequence
  source: /note="Description of Artificial Sequence: Synthetic peptide"
LGS

SEQ ID NO: 802 - protein, 3 aa, Artificial Sequence
  source: /note="Description of Artificial Sequence: Synthetic peptide"
DDS

SEQ ID NO: 803 - protein, 3 aa, Artificial Sequence
  source: /note="Description of Artificial Sequence: Synthetic peptide"
RDK

SEQ ID NO: 804 - protein, 3 aa, Artificial Sequence
  source: /note="Description of Artificial Sequence: Synthetic peptide"
AAS

SEQ ID NO: 805 - protein, 3 aa, Artificial Sequence
  source: /note="Description of Artificial Sequence: Synthetic peptide"
GKN

SEQ ID NO: 806 - protein, 3 aa, Artificial Sequence
  source: /note="Description of Artificial Sequence: Synthetic peptide"
GTN

SEQ ID NO: 807 - protein, 3 aa, Artificial Sequence
  source: /note="Description of Artificial Sequence: Synthetic peptide"
GAS

SEQ ID NO: 808 - protein, 3 aa, Artificial Sequence
  source: /note="Description of Artificial Sequence: Synthetic peptide"
DAS

SEQ ID NO: 809 - protein, 3 aa, Artificial Sequence
  source: /note="Description of Artificial Sequence: Synthetic peptide"
GAS

SEQ ID NO: 810 - protein, 3 aa, Artificial Sequence
  source: /note="Description of Artificial Sequence: Synthetic peptide"
GSS

SEQ ID NO: 811 - protein, 3 aa, Artificial Sequence
  source: /note="Description of Artificial Sequence: Synthetic peptide"
AAS

SEQ ID NO: 812 - protein, 3 aa, Artificial Sequence
  source: /note="Description of Artificial Sequence: Synthetic peptide"
GAS

SEQ ID NO: 813 - protein, 3 aa, Artificial Sequence
  source: /note="Description of Artificial Sequence: Synthetic peptide"
GAS

SEQ ID NO: 814 - protein, 3 aa, Artificial Sequence
  source: /note="Description of Artificial Sequence: Synthetic peptide"
GAS

SEQ ID NO: 815 - protein, 3 aa, Artificial Sequence
  source: /note="Description of Artificial Sequence: Synthetic peptide"
GAS

SEQ ID NO: 816 - protein, 3 aa, Artificial Sequence
  source: /note="Description of Artificial Sequence: Synthetic peptide"
GAS

SEQ ID NO: 817 - protein, 3 aa, Artificial Sequence
  source: /note="Description of Artificial Sequence: Synthetic peptide"
LGS

SEQ ID NO: 818 - protein, 3 aa, Artificial Sequence
  source: /note="Description of Artificial Sequence: Synthetic peptide"
GTS

SEQ ID NO: 819 - protein, 3 aa, Artificial Sequence
  source: /note="Description of Artificial Sequence: Synthetic peptide"
GAS

SEQ ID NO: 820 - protein, 3 aa, Artificial Sequence
  source: /note="Description of Artificial Sequence: Synthetic peptide"
SAS

SEQ ID NO: 821 - protein, 3 aa, Artificial Sequence
  source: /note="Description of Artificial Sequence: Synthetic peptide"
LAS

SEQ ID NO: 822 - protein, 3 aa, Artificial Sequence
  source: /note="Description of Artificial Sequence: Synthetic peptide"
LAS

SEQ ID NO: 823 - protein, 3 aa, Artificial Sequence
  source: /note="Description of Artificial Sequence: Synthetic peptide"
LAS

SEQ ID NO: 824 - protein, 7 aa, Artificial Sequence
  source: /note="Description of Artificial Sequence: Synthetic peptide"
YHSSPSW

SEQ ID NO: 825 - protein, 6 aa, Artificial Sequence
  source: /note="Description of Artificial Sequence: Synthetic peptide"
ALQTPY

SEQ ID NO: 826 - protein, 5 aa, Artificial Sequence
  source: /note="Description of Artificial Sequence: Synthetic peptide"
NIQFP

SEQ ID NO: 827 - protein, 6 aa, Artificial Sequence
  source: /note="Description of Artificial Sequence: Synthetic peptide"
ALQTPY

SEQ ID NO: 828 - protein, 5 aa, Artificial Sequence
  source: /note="Description of Artificial Sequence: Synthetic peptide"
SYKRA

SEQ ID NO: 829 - protein, 6 aa, Artificial Sequence
  source: /note="Description of Artificial Sequence: Synthetic peptide"
GRQFPY

SEQ ID NO: 830 - protein, 5 aa, Artificial Sequence
  source: /note="Description of Artificial Sequence: Synthetic peptide"
YGSSL

SEQ ID NO: 831 - protein, 6 aa, Artificial Sequence
  source: /note="Description of Artificial Sequence: Synthetic peptide"
YGSSSW

SEQ ID NO: 832 - protein, 7 aa, Artificial Sequence
  source: /note="Description of Artificial Sequence: Synthetic peptide"
YGSSPPW

SEQ ID NO: 833 - protein, 4 aa, Artificial Sequence
  source: /note="Description of Artificial Sequence: Synthetic peptide"
SYTL

SEQ ID NO: 834 - protein, 6 aa, Artificial Sequence
  source: /note="Description of Artificial Sequence: Synthetic peptide"
SYSTPY

SEQ ID NO: 835 - protein, 6 aa, Artificial Sequence
  source: /note="Description of Artificial Sequence: Synthetic peptide"
GTHWPG

SEQ ID NO: 836 - protein, 6 aa, Artificial Sequence
  source: /note="Description of Artificial Sequence: Synthetic peptide"
YESLPL

SEQ ID NO: 837 - protein, 7 aa, Artificial Sequence
  source: /note="Description of Artificial Sequence: Synthetic peptide"
YNDWLPV

SEQ ID NO: 838 - protein, 7 aa, Artificial Sequence
  source: /note="Description of Artificial Sequence: Synthetic peptide"
YAGSPPF

SEQ ID NO: 839 - protein, 6 aa, Artificial Sequence
  source: /note="Description of Artificial Sequence: Synthetic peptide"
HDNFPL

SEQ ID NO: 840 - protein, 6 aa, Artificial Sequence
  source: /note="Description of Artificial Sequence: Synthetic peptide"
YYRFPY

SEQ ID NO: 841 - protein, 6 aa, Artificial Sequence
  source: /note="Description of Artificial Sequence: Synthetic peptide"
ALQTPY

SEQ ID NO: 842 - protein, 8 aa, Artificial Sequence
  source: /note="Description of Artificial Sequence: Synthetic peptide"
WDSDSEHV

SEQ ID NO: 843 - protein, 6 aa, Artificial Sequence
  source: /note="Description of Artificial Sequence: Synthetic peptide"
WDDTTV

SEQ ID NO: 844 - protein, 6 aa, Artificial Sequence
  source: /note="Description of Artificial Sequence: Synthetic peptide"
YNSAPF

SEQ ID NO: 845 - protein, 9 aa, Artificial Sequence
  source: /note="Description of Artificial Sequence: Synthetic peptide"
RDSSGDHLR

SEQ ID NO: 846 - protein, 8 aa, Artificial Sequence
  source: /note="Description of Artificial Sequence: Synthetic peptide"
RDSSGHHL

SEQ ID NO: 847 - protein, 11 aa, Artificial Sequence
  source: /note="Description of Artificial Sequence: Synthetic peptide"
YGSSFNGSSLF

SEQ ID NO: 848 - protein, 7 aa, Artificial Sequence
  source: /note="Description of Artificial Sequence: Synthetic peptide"
FGTSSGL

SEQ ID NO: 849 - protein, 7 aa, Artificial Sequence
  source: /note="Description of Artificial Sequence: Synthetic peptide"
YHSSPSW

SEQ ID NO: 850 - protein, 7 aa, Artificial Sequence
  source: /note="Description of Artificial Sequence: Synthetic peptide"
YHSSPSW

SEQ ID NO: 851 - protein, 6 aa, Artificial Sequence
  source: /note="Description of Artificial Sequence: Synthetic peptide"
SYSTPY

SEQ ID NO: 852 - protein, 7 aa, Artificial Sequence
  source: /note="Description of Artificial Sequence: Synthetic peptide"
YESSPSW

SEQ ID NO: 853 - protein, 7 aa, Artificial Sequence
  source: /note="Description of Artificial Sequence: Synthetic peptide"
YGSPPRF

SEQ ID NO: 854 - protein, 7 aa, Artificial Sequence
  source: /note="Description of Artificial Sequence: Synthetic peptide"
YGSSPSW

SEQ ID NO: 855 - protein, 7 aa, Artificial Sequence
  source: /note="Description of Artificial Sequence: Synthetic peptide"
YDSSPSW

SEQ ID NO: 856 - protein, 7 aa, Artificial Sequence
  source: /note="Description of Artificial Sequence: Synthetic peptide"
YGTSPMY

SEQ ID NO: 857 - protein, 6 aa, Artificial Sequence
  source: /note="Description of Artificial Sequence: Synthetic peptide"
ALQTPL

SEQ ID NO: 858 - protein, 8 aa, Artificial Sequence
  source: /note="Description of Artificial Sequence: Synthetic peptide"
YGNSPPKF

SEQ ID NO: 859 - protein, 7 aa, Artificial Sequence
  source: /note="Description of Artificial Sequence: Synthetic peptide"
YGGSPRL

SEQ ID NO: 860 - protein, 6 aa, Artificial Sequence
  source: /note="Description of Artificial Sequence: Synthetic peptide"
HYSTPW

SEQ ID NO: 861 - protein, 6 aa, Artificial Sequence
  source: /note="Description of Artificial Sequence: Synthetic peptide"
SRIFPR

SEQ ID NO: 862 - protein, 6 aa, Artificial Sequence
  source: /note="Description of Artificial Sequence: Synthetic peptide"
SRTIPR

SEQ ID NO: 863 - protein, 6 aa, Artificial Sequence
  source: /note="Description of Artificial Sequence: Synthetic peptide"
SRTIPR

SEQ ID NO: 864 - protein, 10 aa, Artificial Sequence
  source: /note="Description of Artificial Sequence: Synthetic peptide"
GFTFSNYAMS

SEQ ID NO: 865 - protein, 10 aa, Artificial Sequence
  source: /note="Description of Artificial Sequence: Synthetic peptide"
GFTFDDYAMH

SEQ ID NO: 866 - protein, 10 aa, Artificial Sequence
  source: /note="Description of Artificial Sequence: Synthetic peptide"
GFALSNHGMS

SEQ ID NO: 867 - protein, 10 aa, Artificial Sequence
  source: /note="Description of Artificial Sequence: Synthetic peptide"
GYIFDNFGIN

SEQ ID NO: 868 - protein, 10 aa, Artificial Sequence
  source: /note="Description of Artificial Sequence: Synthetic peptide"
GFTFSSDAMT

SEQ ID NO: 869 - protein, 10 aa, Artificial Sequence
  source: /note="Description of Artificial Sequence: Synthetic peptide"
GYTFSNYGIT

SEQ ID NO: 870 - protein, 10 aa, Artificial Sequence
  source: /note="Description of Artificial Sequence: Synthetic peptide"
GFALSNHGMS

SEQ ID NO: 871 - protein, 10 aa, Artificial Sequence
  source: /note="Description of Artificial Sequence: Synthetic peptide"
GFALSNHGMS

SEQ ID NO: 872 - protein, 10 aa, Artificial Sequence
  source: /note="Description of Artificial Sequence: Synthetic peptide"
GFALSNHGMS

SEQ ID NO: 873 - protein, 10 aa, Artificial Sequence
  source: /note="Description of Artificial Sequence: Synthetic peptide"
GFTFSDYYMS

SEQ ID NO: 874 - protein, 10 aa, Artificial Sequence
  source: /note="Description of Artificial Sequence: Synthetic peptide"
GFALSNHGMS

SEQ ID NO: 875 - protein, 10 aa, Artificial Sequence
  source: /note="Description of Artificial Sequence: Synthetic peptide"
GFTFSDYYMS

SEQ ID NO: 876 - protein, 10 aa, Artificial Sequence
  source: /note="Description of Artificial Sequence: Synthetic peptide"
GFALSNHGMS

SEQ ID NO: 877 - protein, 10 aa, Artificial Sequence
  source: /note="Description of Artificial Sequence: Synthetic peptide"
GFALSNHGMS

SEQ ID NO: 878 - protein, 10 aa, Artificial Sequence
  source: /note="Description of Artificial Sequence: Synthetic peptide"
GFALSNHGMS

SEQ ID NO: 879 - protein, 12 aa, Artificial Sequence
  source: /note="Description of Artificial Sequence: Synthetic peptide"
GGSISSSYYYWG

SEQ ID NO: 880 - protein, 12 aa, Artificial Sequence
  source: /note="Description of Artificial Sequence: Synthetic peptide"
GFSLRTSGMCVS

SEQ ID NO: 881 - protein, 10 aa, Artificial Sequence
  source: /note="Description of Artificial Sequence: Synthetic peptide"
GFTFSSYSMN

SEQ ID NO: 882 - protein, 10 aa, Artificial Sequence
  source: /note="Description of Artificial Sequence: Synthetic peptide"
GFTFSDYYMS

SEQ ID NO: 883 - protein, 10 aa, Artificial Sequence
  source: /note="Description of Artificial Sequence: Synthetic peptide"
GYTVTSHYIH

SEQ ID NO: 884 - protein, 12 aa, Artificial Sequence
  source: /note="Description of Artificial Sequence: Synthetic peptide"
GGSISSGGYYWS

SEQ ID NO: 885 - protein, 10 aa, Artificial Sequence
  source: /note="Description of Artificial Sequence: Synthetic peptide"
GGTFSSYAIS

SEQ ID NO: 886 - protein, 12 aa, Artificial Sequence
  source: /note="Description of Artificial Sequence: Synthetic peptide"
GDSVSSNSAAWN

SEQ ID NO: 887 - protein, 10 aa, Artificial Sequence
  source: /note="Description of Artificial Sequence: Synthetic peptide"
GFTFSSYAMS

SEQ ID NO: 888 - protein, 10 aa, Artificial Sequence
  source: /note="Description of Artificial Sequence: Synthetic peptide"
GITFSRYPMS

SEQ ID NO: 889 - protein, 10 aa, Artificial Sequence
  source: /note="Description of Artificial Sequence: Synthetic peptide"
GFTFSSYAMS

SEQ ID NO: 890 - protein, 10 aa, Artificial Sequence
  source: /note="Description of Artificial Sequence: Synthetic peptide"
GFTFSSYAMS

SEQ ID NO: 891 - protein, 10 aa, Artificial Sequence
  source: /note="Description of Artificial Sequence: Synthetic peptide"
GFTFDDYAMH

SEQ ID NO: 892 - protein, 10 aa, Artificial Sequence
  source: /note="Description of Artificial Sequence: Synthetic peptide"
GFTFDDYAMH

SEQ ID NO: 893 - protein, 10 aa, Artificial Sequence
  source: /note="Description of Artificial Sequence: Synthetic peptide"
GFTFSSYAMS

SEQ ID NO: 894 - protein, 10 aa, Artificial Sequence
  source: /note="Description of Artificial Sequence: Synthetic peptide"
GFTFSSYAMS

SEQ ID NO: 895 - protein, 10 aa, Artificial Sequence
  source: /note="Description of Artificial Sequence: Synthetic peptide"
GFTFSSYAMS

SEQ ID NO: 896 - protein, 10 aa, Artificial Sequence
  source: /note="Description of Artificial Sequence: Synthetic peptide"
GFSFSSYAMS

SEQ ID NO: 897 - protein, 10 aa, Artificial Sequence
  source: /note="Description of Artificial Sequence: Synthetic peptide"
GFTFSSYAMS

SEQ ID NO: 898 - protein, 10 aa, Artificial Sequence
  source: /note="Description of Artificial Sequence: Synthetic peptide"
GFTFSSYAMS

SEQ ID NO: 899 - protein, 10 aa, Artificial Sequence
  source: /note="Description of Artificial Sequence: Synthetic peptide"
GFTFSSYAMS

SEQ ID NO: 900 - protein, 10 aa, Artificial Sequence
  source: /note="Description of Artificial Sequence: Synthetic peptide"
GYTFTNFGMN

SEQ ID NO: 901 - protein, 10 aa, Artificial Sequence
  source: /note="Description of Artificial Sequence: Synthetic peptide"
GYTFTDYSIN

SEQ ID NO: 902 - protein, 10 aa, Artificial Sequence
  source: /note="Description of Artificial Sequence: Synthetic peptide"
GYTFRHYSMN

SEQ ID NO: 903 - protein, 10 aa, Artificial Sequence
  source: /note="Description of Artificial Sequence: Synthetic peptide"
GYTFTHYSMN

SEQ ID NO: 904 - protein, 17 aa, Artificial Sequence
  source: /note="Description of Artificial Sequence: Synthetic peptide"
GISRSGENTYYADSVKG

SEQ ID NO: 905 - protein, 17 aa, Artificial Sequence
  source: /note="Description of Artificial Sequence: Synthetic peptide"
GISWNSGSIGYADSVKG

SEQ ID NO: 906 - protein, 16 aa, Artificial Sequence
  source: /note="Description of Artificial Sequence: Synthetic peptide"
GIVYSGSTYYAASVKG

SEQ ID NO: 907 - protein, 17 aa, Artificial Sequence
  source: /note="Description of Artificial Sequence: Synthetic peptide"
WINPKNNNTNYAQKFQG

SEQ ID NO: 908 - protein, 17 aa, Artificial Sequence
  source: /note="Description of Artificial Sequence: Synthetic peptide"
VISGSGGTTYYADSVKG

SEQ ID NO: 909 - protein, 17 aa, Artificial Sequence
  source: /note="Description of Artificial Sequence: Synthetic peptide"
WISAYNGNTNYAQKFQG

SEQ ID NO: 910 - protein, 16 aa, Artificial Sequence
  source: /note="Description of Artificial Sequence: Synthetic peptide"
GIVYSGSTYYAASVKG

SEQ ID NO: 911 - protein, 16 aa, Artificial Sequence
  source: /note="Description of Artificial Sequence: Synthetic peptide"
GIVYSGSTYYAASVKG

SEQ ID NO: 912 - protein, 16 aa, Artificial Sequence
  source: /note="Description of Artificial Sequence: Synthetic peptide"
GIVYSGSTYYAASVKG

SEQ ID NO: 913 - protein, 17 aa, Artificial Sequence
  source: /note="Description of Artificial Sequence: Synthetic peptide"
YISSSGSTIYYADSVKG

SEQ ID NO: 914 - protein, 16 aa, Artificial Sequence
  source: /note="Description of Artificial Sequence: Synthetic peptide"
GIVYSGSTYYAASVKG

SEQ ID NO: 915 - protein, 17 aa, Artificial Sequence
  source: /note="Description of Artificial Sequence: Synthetic peptide"
YISSSGNTIYYADSVKG

SEQ ID NO: 916 - protein, 16 aa, Artificial Sequence
  source: /note="Description of Artificial Sequence: Synthetic peptide"
GIVYSGSTYYAASVKG

SEQ ID NO: 917 - protein, 16 aa, Artificial Sequence
  source: /note="Description of Artificial Sequence: Synthetic peptide"
GIVYSGSTYYAASVKG

SEQ ID NO: 918 - protein, 16 aa, Artificial Sequence
  source: /note="Description of Artificial Sequence: Synthetic peptide"
GIVYSGSTYYAASVKG

SEQ ID NO: 919 - protein, 16 aa, Artificial Sequence
  source: /note="Description of Artificial Sequence: Synthetic peptide"
SIYYSGSAYYNPSLKS

SEQ ID NO: 920 - protein, 16 aa, Artificial Sequence
  source: /note="Description of Artificial Sequence: Synthetic peptide"
RIDWDEDKFYSTSLKT

SEQ ID NO: 921 - protein, 17 aa, Artificial Sequence
  source: /note="Description of Artificial Sequence: Synthetic peptide"
SISSSSSYIYYADSVKG

SEQ ID NO: 922 - protein, 17 aa, Artificial Sequence
  source: /note="Description of Artificial Sequence: Synthetic peptide"
YISSSGSTIYYADSVKG

SEQ ID NO: 923 - protein, 17 aa, Artificial Sequence
  source: /note="Description of Artificial Sequence: Synthetic peptide"
MINPSGGVTAYSQTLQG

SEQ ID NO: 924 - protein, 16 aa, Artificial Sequence
  source: /note="Description of Artificial Sequence: Synthetic peptide"
YIYYSGSTYYNPSLKS

SEQ ID NO: 925 - protein, 17 aa, Artificial Sequence
  source: /note="Description of Artificial Sequence: Synthetic peptide"
GIIPIFGTANYAQKFQG

SEQ ID NO: 926 - protein, 18 aa, Artificial Sequence
  source: /note="Description of Artificial Sequence: Synthetic peptide"
RTYYRSKWYSFYAISLKS

SEQ ID NO: 927 - protein, 17 aa, Artificial Sequence
  source: /note="Description of Artificial Sequence: Synthetic peptide"
AISGSGGSTYYADSVKG

SEQ ID NO: 928 - protein, 17 aa, Artificial Sequence
  source: /note="Description of Artificial Sequence: Synthetic peptide"
GISDSGVSTYYADSAKG

SEQ ID NO: 929 - protein, 17 aa, Artificial Sequence
  source: /note="Description of Artificial Sequence: Synthetic peptide"
AISGSGGSTYYADSVKG

SEQ ID NO: 930 - protein, 17 aa, Artificial Sequence
  source: /note="Description of Artificial Sequence: Synthetic peptide"
AISGSGGSTYYADSVKG

SEQ ID NO: 931 - protein, 17 aa, Artificial Sequence
  source: /note="Description of Artificial Sequence: Synthetic peptide"
GISWNSGSIGYADSVKG

SEQ ID NO: 932 - protein, 17 aa, Artificial Sequence
  source: /note="Description of Artificial Sequence: Synthetic peptide"
SINWKGNSLAYGDSVKG

SEQ ID NO: 933 - protein, 17 aa, Artificial Sequence
  source: /note="Description of Artificial Sequence: Synthetic peptide"
AISGSGGSTYYADSVKG

SEQ ID NO: 934 - protein, 17 aa, Artificial Sequence
  source: /note="Description of Artificial Sequence: Synthetic peptide"
AISGSGGSTYYADSVKG

SEQ ID NO: 935 - protein, 17 aa, Artificial Sequence
  source: /note="Description of Artificial Sequence: Synthetic peptide"
AISGSGGSTYYADSVKG

SEQ ID NO: 936 - protein, 17 aa, Artificial Sequence
  source: /note="Description of Artificial Sequence: Synthetic peptide"
AISGSGGSTYYADSVKG

SEQ ID NO: 937 - protein, 17 aa, Artificial Sequence
  source: /note="Description of Artificial Sequence: Synthetic peptide"
AISGSGGSTYYADSVKG

SEQ ID NO: 938 - protein, 17 aa, Artificial Sequence
  source: /note="Description of Artificial Sequence: Synthetic peptide"
AISGSGGSTYYADSVKG

SEQ ID NO: 939 - protein, 17 aa, Artificial Sequence
  source: /note="Description of Artificial Sequence: Synthetic peptide"
AISGSGGSTYYADSVKG

SEQ ID NO: 940 - protein, 17 aa, Artificial Sequence
  source: /note="Description of Artificial Sequence: Synthetic peptide"
WINTYTGESYFADDFKG

SEQ ID NO: 941 - protein, 17 aa, Artificial Sequence
  source: /note="Description of Artificial Sequence: Synthetic peptide"
WINTETREPAYAYDFRG

SEQ ID NO: 942 - protein, 17 aa, Artificial Sequence
  source: /note="Description of Artificial Sequence: Synthetic peptide"
RINTESGVPIYADDFKG

SEQ ID NO: 943 - protein, 17 aa, Artificial Sequence
  source: /note="Description of Artificial Sequence: Synthetic peptide"
RINTETGEPLYADDFKG

SEQ ID NO: 944 - protein, 11 aa, Artificial Sequence
  source: /note="Description of Artificial Sequence: Synthetic peptide"
SPAHYYGGMDV

SEQ ID NO: 945 - protein, 6 aa, Artificial Sequence
  source: /note="Description of Artificial Sequence: Synthetic peptide"
HSFLAY

SEQ ID NO: 946 - protein, 7 aa, Artificial Sequence
  source: /note="Description of Artificial Sequence: Synthetic peptide"
HGGESDV

SEQ ID NO: 947 - protein, 11 aa, Artificial Sequence
  source: /note="Description of Artificial Sequence: Synthetic peptide"
GPYYYQSYMDV

SEQ ID NO: 948 - protein, 14 aa, Artificial Sequence
  source: /note="Description of Artificial Sequence: Synthetic peptide"
LDSSGYYYARGPRY

SEQ ID NO: 949 - protein, 9 aa, Artificial Sequence
  source: /note="Description of Artificial Sequence: Synthetic peptide"
GPYYYYMDV

SEQ ID NO: 950 - protein, 7 aa, Artificial Sequence
  source: /note="Description of Artificial Sequence: Synthetic peptide"
HGGESDV

SEQ ID NO: 951 - protein, 7 aa, Artificial Sequence
  source: /note="Description of Artificial Sequence: Synthetic peptide"
HGGESDV

SEQ ID NO: 952 - protein, 7 aa, Artificial Sequence
  source: /note="Description of Artificial Sequence: Synthetic peptide"
HGGESDV

SEQ ID NO: 953 - protein, 8 aa, Artificial Sequence
  source: /note="Description of Artificial Sequence: Synthetic peptide"
ESGDGMDV

SEQ ID NO: 954 - protein, 7 aa, Artificial Sequence
  source: /note="Description of Artificial Sequence: Synthetic peptide"
HGGESDV

SEQ ID NO: 955 - protein, 8 aa, Artificial Sequence
  source: /note="Description of Artificial Sequence: Synthetic peptide"
STMVREDY

SEQ ID NO: 956 - protein, 7 aa, Artificial Sequence
  source: /note="Description of Artificial Sequence: Synthetic peptide"
HGGESDV

SEQ ID NO: 957 - protein, 7 aa, Artificial Sequence
  source: /note="Description of Artificial Sequence: Synthetic peptide"
HGGESDV

SEQ ID NO: 958 - protein, 7 aa, Artificial Sequence
  source: /note="Description of Artificial Sequence: Synthetic peptide"
HGGESDV

SEQ ID NO: 959 - protein, 11 aa, Artificial Sequence
  source: /note="Description of Artificial Sequence: Synthetic peptide"
HWQEWPDAFDI

SEQ ID NO: 960 - protein, 13 aa, Artificial Sequence
  source: /note="Description of Artificial Sequence: Synthetic peptide"
SGAGGTSATAFDI

SEQ ID NO: 961 - protein, 10 aa, Artificial Sequence
  source: /note="Description of Artificial Sequence: Synthetic peptide"
TIAAVYAFDI

SEQ ID NO: 962 - protein, 8 aa, Artificial Sequence
  source: /note="Description of Artificial Sequence: Synthetic peptide"
DLRGAFDI

SEQ ID NO: 963 - protein, 11 aa, Artificial Sequence
  source: /note="Description of Artificial Sequence: Synthetic peptide"
EGSGSGWYFDF

SEQ ID NO: 964 - protein, 13 aa, Artificial Sequence
  source: /note="Description of Artificial Sequence: Synthetic peptide"
AGIAARLRGAFDI

SEQ ID NO: 965 - protein, 20 aa, Artificial Sequence
  source: /note="Description of Artificial Sequence: Synthetic peptide"
RGGYQLLRWDVGLLRSAFDI

SEQ ID NO: 966 - protein, 13 aa, Artificial Sequence
  source: /note="Description of Artificial Sequence: Synthetic peptide"
SSPEGLFLYWFDP

SEQ ID NO: 967 - protein, 9 aa, Artificial Sequence
  source: /note="Description of Artificial Sequence: Synthetic peptide"
VEGSGSLDY

SEQ ID NO: 968 - protein, 9 aa, Artificial Sequence
  source: /note="Description of Artificial Sequence: Synthetic peptide"
RAGSEASDI

SEQ ID NO: 969 - protein, 15 aa, Artificial Sequence
  source: /note="Description of Artificial Sequence: Synthetic peptide"
ATYKRELRYYYGMDV

SEQ ID NO: 970 - protein, 15 aa, Artificial Sequence
  source: /note="Description of Artificial Sequence: Synthetic peptide"
ATYKRELRYYYGMDV

SEQ ID NO: 971 - protein, 8 aa, Artificial Sequence
  source: /note="Description of Artificial Sequence: Synthetic peptide"
VGKAVPDV

SEQ ID NO: 972 - protein, 13 aa, Artificial Sequence
  source: /note="Description of Artificial Sequence: Synthetic peptide"
HQGVAYYNYAMDV

SEQ ID NO: 973 - protein, 8 aa, Artificial Sequence
  source: /note="Description of Artificial Sequence: Synthetic peptide"
VVRDGMDV

SEQ ID NO: 974 - protein, 9 aa, Artificial Sequence
  source: /note="Description of Artificial Sequence: Synthetic peptide"
IPQTGTFDY

SEQ ID NO: 975 - protein, 15 aa, Artificial Sequence
  source: /note="Description of Artificial Sequence: Synthetic peptide"
ANYKRELRYYYGMDV

SEQ ID NO: 976 - protein, 11 aa, Artificial Sequence
  source: /note="Description of Artificial Sequence: Synthetic peptide"
ALVGATGAFDI

SEQ ID NO: 977 - protein, 8 aa, Artificial Sequence
  source: /note="Description of Artificial Sequence: Synthetic peptide"
WFGEGFDP

SEQ ID NO: 978 - protein, 17 aa, Artificial Sequence
  source: /note="Description of Artificial Sequence: Synthetic peptide"
VGYDSSGYYRDYYGMDV

SEQ ID NO: 979 - protein, 13 aa, Artificial Sequence
  source: /note="Description of Artificial Sequence: Synthetic peptide"
MGWSSGYLGAFDI

SEQ ID NO: 980 - protein, 13 aa, Artificial Sequence
  source: /note="Description of Artificial Sequence: Synthetic peptide"
GEIYYGYDGGFAY

SEQ ID NO: 981 - protein, 8 aa, Artificial Sequence
  source: /note="Description of Artificial Sequence: Synthetic peptide"
DYSYAMDY

SEQ ID NO: 982 - protein, 8 aa, Artificial Sequence
  source: /note="Description of Artificial Sequence: Synthetic peptide"
DYLYSLDF

SEQ ID NO: 983 - protein, 8 aa, Artificial Sequence
  source: /note="Description of Artificial Sequence: Synthetic peptide"
DYLYSCDY

SEQ ID NO: 984 - protein, 12 aa, Artificial Sequence
  source: /note="Description of Artificial Sequence: Synthetic peptide"
RASQSISSSFLA

SEQ ID NO: 985 - protein, 16 aa, Artificial Sequence
  source: /note="Description of Artificial Sequence: Synthetic peptide"
RSSQSLLHSNGYNYLD

SEQ ID NO: 986 - protein, 16 aa, Artificial Sequence
  source: /note="Description of Artificial Sequence: Synthetic peptide"
KSSQSLLRNDGKTPLY

SEQ ID NO: 987 - protein, 16 aa, Artificial Sequence
  source: /note="Description of Artificial Sequence: Synthetic peptide"
RSSQSLLHSNGYNYLN

SEQ ID NO: 988 - protein, 11 aa, Artificial Sequence
  source: /note="Description of Artificial Sequence: Synthetic peptide"
RASQSISSYLN

SEQ ID NO: 989 - protein, 16 aa, Artificial Sequence
  source: /note="Description of Artificial Sequence: Synthetic peptide"
RSSQSLLYSNGYNYVD

SEQ ID NO: 990 - protein, 11 aa, Artificial Sequence
  source: /note="Description of Artificial Sequence: Synthetic peptide"
RASQSVSSNLA

SEQ ID NO: 991 - protein, 11 aa, Artificial Sequence
  source: /note="Description of Artificial Sequence: Synthetic peptide"
RASQSVSSKLA

SEQ ID NO: 992 - protein, 12 aa, Artificial Sequence
  source: /note="Description of Artificial Sequence: Synthetic peptide"
RASQSVGSTNLA

SEQ ID NO: 993 - protein, 11 aa, Artificial Sequence
  source: /note="Description of Artificial Sequence: Synthetic peptide"
RASQSISSYLN

SEQ ID NO: 994 - protein, 11 aa, Artificial Sequence
  source: /note="Description of Artificial Sequence: Synthetic peptide"
RASQSISSYLN

SEQ ID NO: 995 - protein, 16 aa, Artificial Sequence
  source: /note="Description of Artificial Sequence: Synthetic peptide"
KSSESLVHNSGKTYLN

SEQ ID NO: 996 - protein, 11 aa, Artificial Sequence
  source: /note="Description of Artificial Sequence: Synthetic peptide"
QASEDINKFLN

SEQ ID NO: 997 - protein, 11 aa, Artificial Sequence
  source: /note="Description of Artificial Sequence: Synthetic peptide"
RASQSVGSNLA

SEQ ID NO: 998 - protein, 12 aa, Artificial Sequence
  source: /note="Description of Artificial Sequence: Synthetic peptide"
RASQSIGSSSLA

SEQ ID NO: 999 - protein, 11 aa, Artificial Sequence
  source: /note="Description of Artificial Sequence: Synthetic peptide"
KASQDIDDAMN

SEQ ID NO: 1000 - protein, 11 aa, Artificial Sequence
  source: /note="Description of Artificial Sequence: Synthetic peptide"
RASQDIYNNLA

SEQ ID NO: 1001 - protein, 16 aa, Artificial Sequence
  source: /note="Description of Artificial Sequence: Synthetic peptide"
RSSQSLLHSNGYNYLD

SEQ ID NO: 1002 - protein, 11 aa, Artificial Sequence
  source: /note="Description of Artificial Sequence: Synthetic peptide"
GGNNIGTKSVH

SEQ ID NO: 1003 - protein, 11 aa, Artificial Sequence
  source: /note="Description of Artificial Sequence: Synthetic peptide"
SGDGLSKKYVS

SEQ ID NO: 1004 - protein, 11 aa, Artificial Sequence
  source: /note="Description of Artificial Sequence: Synthetic peptide"
RASQGIRNWLA

SEQ ID NO: 1005 - protein, 11 aa, Artificial Sequence
  source: /note="Description of Artificial Sequence: Synthetic peptide"
GGNNIGSKSVH

SEQ ID NO: 1006 - protein, 11 aa, Artificial Sequence
  source: /note="Description of Artificial Sequence: Synthetic peptide"
QGDSLGNYYAT

SEQ ID NO: 1007 - protein, 12 aa, Artificial Sequence
  source: /note="Description of Artificial Sequence: Synthetic peptide"
RASQSVSSAYLA

SEQ ID NO: 1008 - protein, 11 aa, Artificial Sequence
  source: /note="Description of Artificial Sequence: Synthetic peptide"
RASQSVSNSLA

SEQ ID NO: 1009 - protein, 12 aa, Artificial Sequence
  source: /note="Description of Artificial Sequence: Synthetic peptide"
RASQSVSSSFLA

SEQ ID NO: 1010 - protein, 12 aa, Artificial Sequence
  source: /note="Description of Artificial Sequence: Synthetic peptide"
RASQSVSTTFLA

SEQ ID NO: 1011 - protein, 11 aa, Artificial Sequence
  source: /note="Description of Artificial Sequence: Synthetic peptide"
RASQSISSYLN

SEQ ID NO: 1012 - protein, 12 aa, Artificial Sequence
  source: /note="Description of Artificial Sequence: Synthetic peptide"
RATQSIGSSFLA

SEQ ID NO: 1013 - protein, 12 aa, Artificial Sequence
  source: /note="Description of Artificial Sequence: Synthetic peptide"
RASQSVSSSYLA

SEQ ID NO: 1014 - protein, 12 aa, Artificial Sequence
  source: /note="Description of Artificial Sequence: Synthetic peptide"
RASQSVSSSYLA

SEQ ID NO: 1015 - protein, 12 aa, Artificial Sequence
  source: /note="Description of Artificial Sequence: Synthetic peptide"
RASQRVASNYLA

SEQ ID NO: 1016 - protein, 12 aa, Artificial Sequence
  source: /note="Description of Artificial Sequence: Synthetic peptide"
RASQSLSSNFLA

SEQ ID NO: 1017 - protein, 16 aa, Artificial Sequence
  source: /note="Description of Artificial Sequence: Synthetic peptide"
RSSQSLLHSNGYNYLD

SEQ ID NO: 1018 - protein, 12 aa, Artificial Sequence
  source: /note="Description of Artificial Sequence: Synthetic peptide"
RASQSVSSSYLA

SEQ ID NO: 1019 - protein, 12 aa, Artificial Sequence
  source: /note="Description of Artificial Sequence: Synthetic peptide"
RASQSVASSFLA

SEQ ID NO: 1020 - protein, 11 aa, Artificial Sequence
  source: /note="Description of Artificial Sequence: Synthetic peptide"
RASQDVNTAVS

SEQ ID NO: 1021 - protein, 15 aa, Artificial Sequence
  source: /note="Description of Artificial Sequence: Synthetic peptide"
RASESVSVIGAHLIH

SEQ ID NO: 1022 - protein, 15 aa, Artificial Sequence
  source: /note="Description of Artificial Sequence: Synthetic peptide"
RASESVTILGSHLIY

SEQ ID NO: 1023 - protein, 15 aa, Artificial Sequence
  source: /note="Description of Artificial Sequence: Synthetic peptide"
RASESVTILGSHLIY

SEQ ID NO: 1024 - protein, 7 aa, Artificial Sequence
  source: /note="Description of Artificial Sequence: Synthetic peptide"
GASRRAT

SEQ ID NO: 1025 - protein, 7 aa, Artificial Sequence
  source: /note="Description of Artificial Sequence: Synthetic peptide"
LGSNRAS

SEQ ID NO: 1026 - protein, 7 aa, Artificial Sequence
  source: /note="Description of Artificial Sequence: Synthetic peptide"
EVSNRFS

SEQ ID NO: 1027 - protein, 7 aa, Artificial Sequence
  source: /note="Description of Artificial Sequence: Synthetic peptide"
LGSKRAS

SEQ ID NO: 1028 - protein, 7 aa, Artificial Sequence
  source: /note="Description of Artificial Sequence: Synthetic peptide"
GASTLAS

SEQ ID NO: 1029 - protein, 7 aa, Artificial Sequence
  source: /note="Description of Artificial Sequence: Synthetic peptide"
LGSNRAS

SEQ ID NO: 1030 - protein, 7 aa, Artificial Sequence
  source: /note="Description of Artificial Sequence: Synthetic peptide"
GASTRAS

SEQ ID NO: 1031 - protein, 7 aa, Artificial Sequence
  source: /note="Description of Artificial Sequence: Synthetic peptide"
GASIRAT

SEQ ID NO: 1032 - protein, 7 aa, Artificial Sequence
  source: /note="Description of Artificial Sequence: Synthetic peptide"
DASNRAT

SEQ ID NO: 1033 - protein, 7 aa, Artificial Sequence
  source: /note="Description of Artificial Sequence: Synthetic peptide"
AASSLQS

SEQ ID NO: 1034 - protein, 7 aa, Artificial Sequence
  source: /note="Description of Artificial Sequence: Synthetic peptide"
AASSLQS

SEQ ID NO: 1035 - protein, 7 aa, Artificial Sequence
  source: /note="Description of Artificial Sequence: Synthetic peptide"
EVSNRDS

SEQ ID NO: 1036 - protein, 7 aa, Artificial Sequence
  source: /note="Description of Artificial Sequence: Synthetic peptide"
DASTLQT

SEQ ID NO: 1037 - protein, 7 aa, Artificial Sequence
  source: /note="Description of Artificial Sequence: Synthetic peptide"
GASTRAT

SEQ ID NO: 1038 - protein, 7 aa, Artificial Sequence
  source: /note="Description of Artificial Sequence: Synthetic peptide"
GASSRAS

SEQ ID NO: 1039 - protein, 7 aa, Artificial Sequence
  source: /note="Description of Artificial Sequence: Synthetic peptide"
SATSPVP

SEQ ID NO: 1040 - protein, 7 aa, Artificial Sequence
  source: /note="Description of Artificial Sequence: Synthetic peptide"
AANKSQS

SEQ ID NO: 1041 - protein, 7 aa, Artificial Sequence
  source: /note="Description of Artificial Sequence: Synthetic peptide"
LGSNRAS

SEQ ID NO: 1042 - protein, 7 aa, Artificial Sequence
  source: /note="Description of Artificial Sequence: Synthetic peptide"
DDSVRPS

SEQ ID NO: 1043 - protein, 7 aa, Artificial Sequence
  source: /note="Description of Artificial Sequence: Synthetic peptide"
RDKERPS

SEQ ID NO: 1044 - protein, 7 aa, Artificial Sequence
  source: /note="Description of Artificial Sequence: Synthetic peptide"
AASNLQS

SEQ ID NO: 1045 - protein, 7 aa, Artificial Sequence
  source: /note="Description of Artificial Sequence: Synthetic peptide"
GKNNRPS

SEQ ID NO: 1046 - protein, 7 aa, Artificial Sequence
  source: /note="Description of Artificial Sequence: Synthetic peptide"
GTNNRPS

SEQ ID NO: 1047 - protein, 7 aa, Artificial Sequence
  source: /note="Description of Artificial Sequence: Synthetic peptide"
GASTRAT

SEQ ID NO: 1048 - protein, 7 aa, Artificial Sequence
  source: /note="Description of Artificial Sequence: Synthetic peptide"
DASSRAT

SEQ ID NO: 1049 - protein, 7 aa, Artificial Sequence
  source: /note="Description of Artificial Sequence: Synthetic peptide"
GASSRAT

SEQ ID NO: 1050 - protein, 7 aa, Artificial Sequence
  source: /note="Description of Artificial Sequence: Synthetic peptide"
GSSNRAT

SEQ ID NO: 1051 - protein, 7 aa, Artificial Sequence
  source: /note="Description of Artificial Sequence: Synthetic peptide"
AASSLQS

SEQ ID NO: 1052 - protein, 7 aa, Artificial Sequence
  source: /note="Description of Artificial Sequence: Synthetic peptide"
GASQRAT

SEQ ID NO: 1053 - protein, 7 aa, Artificial Sequence
  source: /note="Description of Artificial Sequence: Synthetic peptide"
GASSRAT

SEQ ID NO: 1054 - protein, 7 aa, Artificial Sequence
  source: /note="Description of Artificial Sequence: Synthetic peptide"
GASSRAT

SEQ ID NO: 1055 - protein, 7 aa, Artificial Sequence
  source: /note="Description of Artificial Sequence: Synthetic peptide"
GASSRAT

SEQ ID NO: 1056 - protein, 7 aa, Artificial Sequence
  source: /note="Description of Artificial Sequence: Synthetic peptide"
GASNWAT

SEQ ID NO: 1057 - protein, 7 aa, Artificial Sequence
  source: /note="Description of Artificial Sequence: Synthetic peptide"
LGSNRAS

SEQ ID NO: 1058 - protein, 7 aa, Artificial Sequence
  source: /note="Description of Artificial Sequence: Synthetic peptide"
GTSSRAT

SEQ ID NO: 1059 - protein, 7 aa, Artificial Sequence
  source: /note="Description of Artificial Sequence: Synthetic peptide"
GASGRAT

SEQ ID NO: 1060 - protein, 7 aa, Artificial Sequence
  source: /note="Description of Artificial Sequence: Synthetic peptide"
SASYRYT

SEQ ID NO: 1061 - protein, 7 aa, Artificial Sequence
  source: /note="Description of Artificial Sequence: Synthetic peptide"
LASNLET

SEQ ID NO: 1062 - protein, 7 aa, Artificial Sequence
  source: /note="Description of Artificial Sequence: Synthetic peptide"
LASNVQT

SEQ ID NO: 1063 - protein, 7 aa, Artificial Sequence
  source: /note="Description of Artificial Sequence: Synthetic peptide"
LASNVQT

SEQ ID NO: 1064 - protein, 10 aa, Artificial Sequence
  source: /note="Description of Artificial Sequence: Synthetic peptide"
QQYHSSPSWT

SEQ ID NO: 1065 - protein, 9 aa, Artificial Sequence
  source: /note="Description of Artificial Sequence: Synthetic peptide"
MQALQTPYT

SEQ ID NO: 1066 - protein, 8 aa, Artificial Sequence
  source: /note="Description of Artificial Sequence: Synthetic peptide"
MQNIQFPS

SEQ ID NO: 1067 - protein, 9 aa, Artificial Sequence
  source: /note="Description of Artificial Sequence: Synthetic peptide"
MQALQTPYT

SEQ ID NO: 1068 - protein, 8 aa, Artificial Sequence
  source: /note="Description of Artificial Sequence: Synthetic peptide"
QQSYKRAS

SEQ ID NO: 1069 - protein, 9 aa, Artificial Sequence
  source: /note="Description of Artificial Sequence: Synthetic peptide"
MQGRQFPYS

SEQ ID NO: 1070 - protein, 8 aa, Artificial Sequence
  source: /note="Description of Artificial Sequence: Synthetic peptide"
QQYGSSLT

SEQ ID NO: 1071 - protein, 9 aa, Artificial Sequence
  source: /note="Description of Artificial Sequence: Synthetic peptide"
QQYGSSSWT

SEQ ID NO: 1072 - protein, 10 aa, Artificial Sequence
  source: /note="Description of Artificial Sequence: Synthetic peptide"
QQYGSSPPWT

SEQ ID NO: 1073 - protein, 7 aa, Artificial Sequence
  source: /note="Description of Artificial Sequence: Synthetic peptide"
QQSYTLA

SEQ ID NO: 1074 - protein, 9 aa, Artificial Sequence
  source: /note="Description of Artificial Sequence: Synthetic peptide"
QQSYSTPYT

SEQ ID NO: 1075 - protein, 9 aa, Artificial Sequence
  source: /note="Description of Artificial Sequence: Synthetic peptide"
MQGTHWPGT

SEQ ID NO: 1076 - protein, 9 aa, Artificial Sequence
  source: /note="Description of Artificial Sequence: Synthetic peptide"
QQYESLPLT

SEQ ID NO: 1077 - protein, 10 aa, Artificial Sequence
  source: /note="Description of Artificial Sequence: Synthetic peptide"
QQYNDWLPVT

SEQ ID NO: 1078 - protein, 10 aa, Artificial Sequence
  source: /note="Description of Artificial Sequence: Synthetic peptide"
QQYAGSPPFT

SEQ ID NO: 1079 - protein, 9 aa, Artificial Sequence
  source: /note="Description of Artificial Sequence: Synthetic peptide"
LQHDNFPLT

SEQ ID NO: 1080 - protein, 9 aa, Artificial Sequence
  source: /note="Description of Artificial Sequence: Synthetic peptide"
QHYYRFPYS

SEQ ID NO: 1081 - protein, 9 aa, Artificial Sequence
  source: /note="Description of Artificial Sequence: Synthetic peptide"
MQALQTPYT

SEQ ID NO: 1082 - protein, 11 aa, Artificial Sequence
  source: /note="Description of Artificial Sequence: Synthetic peptide"
QVWDSDSEHVV

SEQ ID NO: 1083 - protein, 9 aa, Artificial Sequence
  source: /note="Description of Artificial Sequence: Synthetic peptide"
QAWDDTTVV

SEQ ID NO: 1084 - protein, 9 aa, Artificial Sequence
  source: /note="Description of Artificial Sequence: Synthetic peptide"
QKYNSAPFT

SEQ ID NO: 1085 - protein, 12 aa, Artificial Sequence
  source: /note="Description of Artificial Sequence: Synthetic peptide"
SSRDSSGDHLRV

SEQ ID NO: 1086 - protein, 11 aa, Artificial Sequence
  source: /note="Description of Artificial Sequence: Synthetic peptide"
NSRDSSGHHLL

SEQ ID NO: 1087 - protein, 14 aa, Artificial Sequence
  source: /note="Description of Artificial Sequence: Synthetic peptide"
QHYGSSFNGSSLFT

SEQ ID NO: 1088 - protein, 10 aa, Artificial Sequence
  source: /note="Description of Artificial Sequence: Synthetic peptide"
QQFGTSSGLT

SEQ ID NO: 1089 - protein, 10 aa, Artificial Sequence
  source: /note="Description of Artificial Sequence: Synthetic peptide"
QQYHSSPSWT

SEQ ID NO: 1090 - protein, 10 aa, Artificial Sequence
  source: /note="Description of Artificial Sequence: Synthetic peptide"
QQYHSSPSWT

SEQ ID NO: 1091 - protein, 9 aa, Artificial Sequence
  source: /note="Description of Artificial Sequence: Synthetic peptide"
QQSYSTPYS

SEQ ID NO: 1092 - protein, 10 aa, Artificial Sequence
  source: /note="Description of Artificial Sequence: Synthetic peptide"
QHYESSPSWT

SEQ ID NO: 1093 - protein, 10 aa, Artificial Sequence
  source: /note="Description of Artificial Sequence: Synthetic peptide"
QQYGSPPRFT

SEQ ID NO: 1094 - protein, 10 aa, Artificial Sequence
  source: /note="Description of Artificial Sequence: Synthetic peptide"
QHYGSSPSWT

SEQ ID NO: 1095 - protein, 10 aa, Artificial Sequence
  source: /note="Description of Artificial Sequence: Synthetic peptide"
QHYDSSPSWT

SEQ ID NO: 1096 - protein, 10 aa, Artificial Sequence
  source: /note="Description of Artificial Sequence: Synthetic peptide"
QYYGTSPMYT

SEQ ID NO: 1097 - protein, 9 aa, Artificial Sequence
  source: /note="Description of Artificial Sequence: Synthetic peptide"
MQALQTPLT

SEQ ID NO: 1098 - protein, 11 aa, Artificial Sequence
  source: /note="Description of Artificial Sequence: Synthetic peptide"
QHYGNSPPKFT

SEQ ID NO: 1099 - protein, 10 aa, Artificial Sequence
  source: /note="Description of Artificial Sequence: Synthetic peptide"
QHYGGSPRLT

SEQ ID NO: 1100 - protein, 9 aa, Artificial Sequence
  source: /note="Description of Artificial Sequence: Synthetic peptide"
QQHYSTPWT

SEQ ID NO: 1101 - protein, 9 aa, Artificial Sequence
  source: /note="Description of Artificial Sequence: Synthetic peptide"
LQSRIFPRT

SEQ ID NO: 1102 - protein, 9 aa, Artificial Sequence
  source: /note="Description of Artificial Sequence: Synthetic peptide"
LQSRTIPRT

SEQ ID NO: 1103 - protein, 9 aa, Artificial Sequence
  source: /note="Description of Artificial Sequence: Synthetic peptide"
LQSRTIPRT

SEQ ID NO: 1104 - protein, 41 aa, Artificial Sequence
  source: /note="Description of Artificial Sequence: Synthetic polypeptide"
RSKRSRLLHSDYMNMTPRRPGPTRKHYQPYAPPRDFAAYRS

SEQ ID NO: 1105 - DNA, 123 bp, Artificial Sequence; identical to SEQ ID NO: 19
  source: /note="Description of Artificial Sequence: Synthetic polynucleotide"

SEQ ID NO: 1106 - protein, 35 aa, Artificial Sequence
  source: /note="Description of Artificial Sequence: Synthetic polypeptide"
TKKKYSSSVHDPNGEYMFMRAVNTAKKSRLTDVTL

SEQ ID NO: 1107 - DNA, 105 bp, Artificial Sequence
  source: /note="Description of Artificial Sequence: Synthetic polynucleotide"
acaaaaaagaagtattcatccagtgtgcacgaccctaacggtgaatacatgttcatgagagcagtgaacacagccaaaaaatccagactcacagatgtgacccta

SEQ ID NO: 1108 - protein, 18 aa, Artificial Sequence
  source: /note="Description of Artificial Sequence: Synthetic peptide"
GSTSGSGKPGSGEGSTKG

SEQ ID NO: 1109 - DNA, 521 bp, Unknown
  source: /note="Description of Unknown: PGK promoter sequence"
acccctctctccagccactaagccagttgctccctcggctgacggctgcacgcgaggcctccgaacgtcttacgccttgtggcgcgcccgtccttgtcccgggtgtgatggcggggtgtggggcggagggcgtggcggggaagggccggcgacgagagccgcgcgggacgactcgtcggcgataaccggtgtcgggtagcgccagccgcgcgacggtaacgagggaccgcgacaggcagacgctcccatgatcactctgcacgccgaaggcaaatagtgcaggccgtgcggcgcttggcgttccttggaagggctgaatccccgcctcgtccttcgcagcggccccccgggtgttcccatcgccgcttctaggcccactgcgacgcttgcctgcacttcttacacgctctgggtcccagccgcggcgacgcaaagggccttggtgcgggtctcgtcggcgcagggacgcgtttgggtcccgacggaaccttttccgcgttggggttggggcaccataagct

SEQ ID NO: 1110 - DNA, 118 bp, Artificial Sequence
  source: /note="Description of Artificial Sequence: Synthetic polynucleotide"
acccctctctccagccactaagccagttgctccctcggctgacggctgcacgcgaggcctccgaacgtcttacgccttgtggcgcgcccgtccttgtcccgggtgtgatggcggggtg

SEQ ID NO: 1111 - DNA, 221 bp, Artificial Sequence
  source: /note="Description of Artificial Sequence: Synthetic polynucleotide"
acccctctctccagccactaagccagttgctccctcggctgacggctgcacgcgaggcctccgaacgtcttacgccttgtggcgcgcccgtccttgtcccgggtgtgatggcggggtgtggggcggagggcgtggcggggaagggccggcgacgagagccgcgcgggacgactcgtcggcgataaccggtgtcgggtagcgccagccgcgcgacggtaacg

SEQ ID NO: 1112 - DNA, 324 bp, Artificial Sequence
  source: /note="Description of Artificial Sequence: Synthetic polynucleotide"
acccctctctccagccactaagccagttgctccctcggctgacggctgcacgcgaggcctccgaacgtcttacgccttgtggcgcgcccgtccttgtcccgggtgtgatggcggggtgtggggcggagggcgtggcggggaagggccggcgacgagagccgcgcgggacgactcgtcggcgataaccggtgtcgggtagcgccagccgcgcgacggtaacgagggaccgcgacaggcagacgctcccatgatcactctgcacgccgaaggcaaatagtgcaggccgtgcggcgcttggcgttccttggaagggctgaatccccg

SEQ ID NO: 1113 - DNA, 422 bp, Artificial Sequence
  source: /note="Description of Artificial Sequence: Synthetic polynucleotide"
acccctctctccagccactaagccagttgctccctcggctgacggctgcacgcgaggcctccgaacgtcttacgccttgtggcgcgcccgtccttgtcccgggtgtgatggcggggtgtggggcggagggcgtggcggggaagggccggcgacgagagccgcgcgggacgactcgtcggcgataaccggtgtcgggtagcgccagccgcgcgacggtaacgagggaccgcgacaggcagacgctcccatgatcactctgcacgccgaaggcaaatagtgcaggccgtgcggcgcttggcgttccttggaagggctgaatccccgcctcgtccttcgcagcggccccccgggtgttcccatcgccgcttctaggcccactgcgacgcttgcctgcacttcttacacgctctgggtcccagccg

SEQ ID NO: 1114 - protein, 21 aa, Artificial Sequence
  source: /note="Description of Artificial Sequence: Synthetic peptide"
  VARIANT (1)..(3): /replace=" "
  MISC_FEATURE (1)..(21): /note="Variant residues given in the sequence have no preference with respect to those in the annotations for variant positions"
GSGEGRGSLLTCGDVEENPGP

SEQ ID NO: 1115 - protein, 22 aa, Artificial Sequence
  source: /note="Description of Artificial Sequence: Synthetic peptide"
  VARIANT (1)..(3): /replace=" "
  MISC_FEATURE (1)..(22): /note="Variant residues given in the sequence have no preference with respect to those in the annotations for variant positions"
GSGATNFSLLKQAGDVEENPGP

SEQ ID NO: 1116 - protein, 23 aa, Artificial Sequence
  source: /note="Description of Artificial Sequence: Synthetic peptide"
  VARIANT (1)..(3): /replace=" "
  MISC_FEATURE (1)..(23): /note="Variant residues given in the sequence have no preference with respect to those in the annotations for variant positions"
GSGQCTNYALLKLAGDVESNPGP

SEQ ID NO: 1117 - protein, 25 aa, Artificial Sequence
  source: /note="Description of Artificial Sequence: Synthetic peptide"
  VARIANT (1)..(3): /replace=" "
  MISC_FEATURE (1)..(25): /note="Variant residues given in the sequence have no preference with respect to those in the annotations for variant positions"
GSGVKQTLNFDLLKLAGDVESNPGP

SEQ ID NO: 1118 - protein, 121 aa, Artificial Sequence
  source: /note="Description of Artificial Sequence: Synthetic polypeptide"
QVQLVQSGAEVKKPGSSVKVSCKASGGTFSNYWMHWVRQAPGQGLEWMGATYRGHSDTYYNQKFKGRVTITADKSTSTAYMELSSLRSEDTAVYYCARGAIYDGYDVLDNWGQGTLVTVSS

SEQ ID NO: 1119 - protein, 108 aa, Artificial Sequence
  source: /note="Description of Artificial Sequence: Synthetic polypeptide"
DIQMTQSPSSLSASVGDRVTITCSASQDISNYLNWYQQKPGKAPKLLIYYTSNLHSGVPSRFSGSGSGTDFTLTISSLQPEDFATYYCQQYRKLPWTFGQGTKLEIKR

SEQ ID NO: 1120 - protein, 451 aa, Artificial Sequence
  source: /note="Description of Artificial Sequence: Synthetic polypeptide"
  VARIANT (451)..(451): /replace=" "
  MISC_FEATURE (1)..(451): /note="Variant residues given in the sequence have no preference with respect to those in the annotations for variant positions"
QVQLVQSGAEVKKPGSSVKVSCKASGGTFSNYWMHWVRQAPGQGLEWMGATYRGHSDTYYNQKFKGRVTITADKSTSTAYMELSSLRSEDTAVYYCARGAIYNGYDVLDNWGQGTLVTVSSASTKGPSVFPLAPSSKSTSGGTAALGCLVKDYFPEPVTVSWNSGALTSGVHTFPAVLQSSGLYSLSSVVTVPSSSLGTQTYICNVNHKPSNTKVDKRVEPKSCDKTHTCPPCPAPELLGGPSVFLFPPKPKDTLMISRTPEVTCVVVAVSHEDPEVKFNWYVDGVEVHNAKTKPREEQYNSTYRVVSVLTVLHQDWLNGKEYKCKVSNKALAAPIEKTISKAKGQPREPQVCTLPPSREEMTKNQVSLSCAVKGFYPSDIAVEWESNGQPENNYKTTPPVLDSDGSFFLVSKLTVDKSRWQQGNVFSCSVMHEALHNHYTQKSLSLSPGK

SEQ ID NO: 1121 - protein, 214 aa, Artificial Sequence
  source: /note="Description of Artificial Sequence: Synthetic polypeptide"
DIQMTQSPSSLSASVGDRVTITCSASQDISNYLNWYQQKPGKAPKLLIYYTSNLHSGVPSRFSGSGSGTDFTLTISSLQPEDFATYYCQQYRKLPWTFGQGTKLEIKRTVAAPSVFIFPPSDEQLKSGTASVVCLLNNFYPREAKVQWKVDNALQSGNSQESVTEQDSKDSTYSLSSTLTLSKADYEKHKVYACEVTHQGLSSPVTKSFNRGEC

SEQ ID NO: 1122 - skipped

SEQ ID NO: 1123 - protein, 119 aa, Artificial Sequence
  source: /note="Description of Artificial Sequence: Synthetic polypeptide"
EVQLLESGGGLVQPGGSLRLSCAASGFTFSSYAMSWVRQAPGKGLEWVSAISGSGGSTYYADSVKGRFTISRDNSKNTLYLQMNSLRAEDTAVYYCAKVAPYFAPFDYWGQGTLVTVSS

SEQ ID NO: 1124 - protein, 109 aa, Artificial Sequence
  source: /note="Description of Artificial Sequence: Synthetic polypeptide"
EIVLTQSPGTLSLSPGERATLSCRASQSVSSSYLAWYQQKPGQAPRLLIYGASSRATGIPDRFSGSGSGTDFTLTISRLEPEDFAVYYCQQYGNPPLYTFGQGTKVEIK

SEQ ID NO: 1125 - protein, 449 aa, Artificial Sequence
  source: /note="Description of Artificial Sequence: Synthetic polypeptide"
  VARIANT (449)..(449): /replace=" "
  MISC_FEATURE (1)..(449): /note="Variant residues given in the sequence have no preference with respect to those in the annotations for variant positions"
EVQLLESGGGLVQPGGSLRLSCAASGFTFSSYAMSWVRQAPGKGLEWVSAISGSGGSTYYADSVKGRFTISRDNSKNTLYLQMNSLRAEDTAVYYCAKVAPYFAPFDYWGQGTLVTVSSASTKGPSVFPLAPSSKSTSGGTAALGCLVKDYFPEPVTVSWNSGALTSGVHTFPAVLQSSGLYSLSSVVTVPSSSLGTQTYICNVNHKPSNTKVDKRVEPKSCDKTHTCPPCPAPELLGGPSVFLFPPKPKDTLMISRTPEVTCVVVDVSHEDPEVKFNWYVDGVEVHNAKTKPREEQYASTYRVVSVLTVLHQDWLNGKEYKCKVSNKALPAPIEKTISKAKGQPREPQVCTLPPSREEMTKNQVSLSCAVKGFYPSDIAVEWESNGQPENNYKTTPPVLDSDGSFFLVSKLTVDKSRWQQGNVFSCSVMHEALHNHYTQKSLSLSPGK

SEQ ID NO: 1126 - protein, 216 aa, Artificial Sequence
  source: /note="Description of Artificial Sequence: Synthetic polypeptide"
EIVLTQSPGTLSLSPGERATLSCRASQSVSSSYLAWYQQKPGQAPRLLIYGASSRATGIPDRFSGSGSGTDFTLTISRLEPEDFAVYYCQQYGNPPLYTFGQGTKVEIKRTVAAPSVFIFPPSDEQLKSGTASVVCLLNNFYPREAKVQWKVDNALQSGNSQESVTEQDSKDSTYSLSSTLTLSKADYEKHKVYACEVTHQGLSSPVTKSFNRGEC

SEQ ID NO: 1127 - protein, 117 aa, Artificial Sequence; identical to SEQ ID NO: 256
  source: /note="Description of Artificial Sequence: Synthetic polypeptide"

SEQ ID NO: 1128 - protein, 111 aa, Artificial Sequence
  source: /note="Description of Artificial Sequence: Synthetic polypeptide"
DIVLTQSPPSLAMSLGKRATISCRASESVTILGSHLIHWYQQKPGQPPTLLIQLASNVQTGVPARFSGSGSRTDFTLTIDPVEEDDVAVYYCLQSRTIPRTFGGGTKLEIK

SEQ ID NO: 1129 - protein, 447 aa, Artificial Sequence
  source: /note="Description of Artificial Sequence: Synthetic polypeptide"
  VARIANT (447)..(447): /replace=" "
  MISC_FEATURE (1)..(447): /note="Variant residues given in the sequence have no preference with respect to those in the annotations for variant positions"
QIQLVQSGPELKKPGETVKISCKASGYTFTDYSINWVKRAPGKGLKWMGWINTETREPAYAYDFRGRFAFSLETSASTAYLQINNLKYEDTATYFCALDYSYAMDYWGQGTSVTVSSASTKGPSVFPLAPSSKSTSGGTAALGCLVKDYFPEPVTVSWNSGALTSGVHTFPAVLQSSGLYSLSSVVTVPSSSLGTQTYICNVNHKPSNTKVDKRVEPKSCDKTHTCPPCPAPELLGGPSVFLFPPKPKDTLMISRTPEVTCVVVDVSHEDPEVKFNWYVDGVEVHNAKTKPREEQYASTYRVVSVLTVLHQDWLNGKEYKCKVSNKALPAPIEKTISKAKGQPREPQVCTLPPSREEMTKNQVSLSCAVKGFYPSDIAVEWESNGQPENNYKTTPPVLDSDGSFFLVSKLTVDKSRWQQGNVFSCSVMHEALHNHYTQKSLSLSPGK

SEQ ID NO: 1130 - protein, 218 aa, Artificial Sequence
  source: /note="Description of Artificial Sequence: Synthetic polypeptide"
DIVLTQSPASLAMSLGKRATISCRASESVSVIGAHLIHWYQQKPGQPPKLLIYLASNLETGVPARFSGSGSGTDFTLTIDPVEEDDVAIYSCLQSRIFPRTFGGGTKLEIKRTVAAPSVFIFPPSDEQLKSGTASVVCLLNNFYPREAKVQWKVDNALQSGNSQESVTEQDSKDSTYSLSSTLTLSKADYEKHKVYACEVTHQGLSSPVTKSFNRGEC

SEQ ID NO: 1131 - protein, 116 aa, Artificial Sequence
  source: /note="Description of Artificial Sequence: Synthetic polypeptide"
EVQLLESGGGLVQPGGSLRLSCAASGFTFSSYAMSWVRQAPGKGLEWVSAISGSGGSTYYADSVKGRFTISRDNSKNTLYLQMNSLRAEDTAVYYCAKVLGWFDYWGQGTLVTVSS

SEQ ID NO: 1132 - protein, 109 aa, Artificial Sequence
  source: /note="Description of Artificial Sequence: Synthetic polypeptide"
EIVLTQSPGTLSLSPGERATLSCRASQSVSSSYLAWYQQKPGQAPRLLIYGASSRATGIPDRFSGSGSGTDFTLTISRLEPEDFAVYYCQQYGYPPDFTFGQGTKVEIK

SEQ ID NO: 1133 - protein, 477 aa, Artificial Sequence
  source: /note="Description of Artificial Sequence: Synthetic polypeptide"
  VARIANT (477)..(477): /replace=" "
  MISC_FEATURE (1)..(477): /note="Variant residues given in the sequence have no preference with respect to those in the annotations for variant positions"
EVQLLESGGGLVQPGGSLRLSCAASGFTFSSYAMSWVRQAPGKGLEWVSAISGSGGSTYYADSVKGRFTISRDNSKNTLYLQMNSLRAEDTAVYYCAKVLGWFDYWGQGTLVTVSSGGGGSGGGGSGGGGSGGGGSEIVLTQSPGTLSLSPGERATLSCRASQSVSSSYLAWYQQKPGQAPRLLIYGASSRATGIPDRFSGSGSGTDFTLTISRLEPEDFAVYYCQQYGYPPDFTFGQGTKVEIKGGGGSDKTHTCPPCPAPELLGGPSVFLFPPKPKDTLMISRTPEVTCVVVAVSHEDPEVKFNWYVDGVEVHNAKTKPREEQYNSTYRVVSVLTVLHQDWLNGKEYKCKVSNKALAAPIEKTISKAKGQPREPQVYTLPPCRDELTKNQVSLWCLVKGFYPSDIAVEWESNGQPENNYKTTPPVLDSDGSFFLYSKLTVDKSRWQQGNVFSCSVMHEALHNHYTQKSLSLSPGK

SEQ ID NO: 1134-1152 - skipped (19 entries)

SEQ ID NO: 1153 - protein, 215 aa, Artificial Sequence
  source: /note="Description of Artificial Sequence: Synthetic polypeptide"
QAVVTQEPSLTVSPGGTVTLTCGSSTGAVTTSNYANWVQEKPGQAFRGLIGGTNKRAPGTPARFSGSLLGGKAALTLSGAQPEDEAEYYCALWYSNLWVFGGGTKLTVLGQPKAAPSVTLFPPSSEELQANKATLVCLISDFYPGAVTVAWKADSSPVKAGVETTTPSKQSNNKYAASSYLSLTPEQWKSHRSYSCQVTHEGSTVEKTVAPTECS

SEQ ID NO: 1154 - protein, 449 aa, Artificial Sequence
  source: /note="Description of Artificial Sequence: Synthetic polypeptide"
  VARIANT (449)..(449): /replace=" "
  MISC_FEATURE (1)..(449): /note="Variant residues given in the sequence have no preference with respect to those in the annotations for variant positions"
EVQLVESGGGLVKPGGSLRLSCAASGFTFSNSGMIWVRQAPGKGLEWVGHIRSKTDGGTTDYAAPVKGRFTISRDDSKNTLYLQMNSLKTEDTAVYYCTTGGSGSFDYWGQGTLVTVSSASTKGPSVFPLAPSSKSTSGGTAALGCLVKDYFPEPVTVSWNSGALTSGVHTFPAVLQSSGLYSLSSVVTVPSSSLGTQTYICNVNHKPSNTKVDKRVEPKSCDKTHTCPPCPAPEAAGGPSVFLFPPKPKDTLMISRTPEVTCVVVDVSHEDPEVKFNWYVDGVEVHNAKTKPREEQYNSTYRVVSVLTVLHQDWLNGKEYKCKVSNKALPAPIEKTISKAKGQPREPQVCTLPPSREEMTKNQVSLSCAVKGFYPSDIAVEWESNGQPENNYKTTPPVLDSDGSFFLVSKLTVDKSRWQQGNVFSCSVMHEALHNHYTQKSLSLSPGK

What is claimed is:

1. A composition comprising a cell (e.g., a population of cells) that expresses a CAR molecule that binds BCMA (a “BCMA CAR-expressing cell”) for use, in combination with a gamma secretase inhibitor (GSI), in the treatment of a subject having a disease associated with expression of BCMA, wherein:
the CAR molecule comprises an anti-BCMA binding domain, a transmembrane domain, and an intracellular signaling domain, and wherein:
the GSI has one or more (e.g., 1, 2, 3, 4, 5, 6, 7, 8, 9, 10, 11, 12, or all) of the following properties:
(i) the GSI reduces gamma secretase-mediated cleavage of BCMA;
(ii) the GSI, when incubated with BCMA-expressing cells, increases cell surface expression of BCMA, e.g., by at least 2, 4, 6, 8, 10, 15, or 20-fold, e.g., as measured by a method described herein, e.g., a flow cytometry assay, e.g., as measured using methods described in Example 1 with respect to FIG. 1;
(iii) the GSI, when incubated with BCMA-expressing cells, changes conformation and/or posttranslational modification of the extracellular domain of cell surface-expressed BCMA;
(iv) the GSI, when incubated with BCMA-expressing cells, decreases the level of soluble BCMA in the cell supernatant, e.g., by at least 80, 85, 90, 95, 99, or 99.5%, e.g., as measured by a method described herein, e.g., an ELISA assay, e.g., as measured using methods described in Example 1 with respect to Table 28;
(v) the GSI, when administered in vivo, increases cell surface expression of BCMA, e.g., as measured by a method described herein, e.g., a flow cytometry assay;
(vi) the GSI, when administered in vivo, changes conformation and/or posttranslational modification of the extracellular domain of cell surface-expressed BCMA;
(vii) the GSI, when administered in vivo, decreases the level of soluble BCMA in the serum and/or bone marrow, e.g., as measured by a method described herein, e.g., an ELISA assay;
(viii) the GSI is capable of increasing the activity of the BCMA CAR-expressing cell, e.g., increasing the cytotoxicity of the BCMA CAR-expressing cell, e.g., as measured by a method described herein, e.g., as measured using methods described in Example 3 with respect to FIGS. 7B and 7C;
(ix) the GSI is capable of increasing the activity of the BCMA CAR-expressing cell, e.g., increasing the anti-tumor activity of the BCMA CAR-expressing cell, e.g., as measured by a method described herein, e.g., as measured using methods described in Example 3 with respect to FIG. 9D;
(x) the GSI does not reduce gamma secretase-mediated cleavage of Notch, or reduces gamma secretase-mediated cleavage of Notch less efficiently, e.g., at least 2-fold, 5-fold, 10-fold, 50-fold, or 100-fold less efficiently, than the GSI reduces gamma secretase-mediated cleavage of BCMA;
(xi) the GSI reduces gamma secretase-mediated cleavage of BCMA more efficiently, e.g., at least 2-fold, 5-fold, 10-fold, 50-fold, or 100-fold more efficiently, than the GSI reduces gamma secretase-mediated cleavage of another substrate of gamma secretase, e.g., Cadherins, ErbB, or CD44;
(xii) the GSI specifically binds to Presenilin-1, e.g., the GSI binds to Presenilin-1 with higher affinity, e.g., at least 2-fold, 5-fold, 10-fold, 50-fold, or 100-fold higher affinity, than the GSI binds to another subunit of gamma secretase, e.g., nicastrin, anterior pharynx-defective 1, or presenilin enhancer 2; or
(xiii) the GSI exhibits low gastrointestinal toxicity.

2. A method of treating a subject having a disease associated with expression of B-cell maturation antigen (BCMA) comprising administering to the subject an effective amount of a cell (e.g., a population of cells) that expresses a chimeric antigen receptor (CAR) molecule that binds BCMA (a “BCMA CAR-expressing cell”), in combination with a gamma secretase inhibitor (GSI), wherein:
the CAR molecule comprises an anti-BCMA binding domain, a transmembrane domain, and an intracellular signaling domain, and wherein:
the GSI has one or more (e.g., 1, 2, 3, 4, 5, 6, 7, 8, 9, 10, 11, 12, or all) of the following properties:
(i) the GSI reduces gamma secretase-mediated cleavage of BCMA;
(ii) the GSI, when incubated with BCMA-expressing cells, increases cell surface expression of BCMA, e.g., by at least 2, 4, 6, 8, 10, 15, or 20-fold, e.g., as measured by a method described herein, e.g., a flow cytometry assay, e.g., as measured using methods described in Example 1 with respect to FIG. 1;
(iii) the GSI, when incubated with BCMA-expressing cells, changes conformation and/or posttranslational modification of the extracellular domain of cell surface-expressed BCMA;
(iv) the GSI, when incubated with BCMA-expressing cells, decreases the level of soluble BCMA in the cell supernatant, e.g., by at least 80, 85, 90, 95, 99, or 99.5%, e.g., as measured by a method described herein, e.g., an ELISA assay, e.g., as measured using methods described in Example 1 with respect to Table 28;
(v) the GSI, when administered in vivo, increases cell surface expression of BCMA, e.g., as measured by a method described herein, e.g., a flow cytometry assay;
(vi) the GSI, when administered in vivo, changes conformation and/or posttranslational modification of the extracellular domain of cell surface-expressed BCMA;
(vii) the GSI, when administered in vivo, decreases the level of soluble BCMA in the serum and/or bone marrow, e.g., as measured by a method described herein, e.g., an ELISA assay;
(viii) the GSI is capable of increasing the activity of the BCMA CAR-expressing cell, e.g., increasing the cytotoxicity of the BCMA CAR-expressing cell, e.g., as measured by a method described herein, e.g., as measured using methods described in Example 3 with respect to FIGS. 7B and 7C;
(ix) the GSI is capable of increasing the activity of the BCMA CAR-expressing cell, e.g., increasing the anti-tumor activity of the BCMA CAR-expressing cell, e.g., as measured by a method described herein, e.g., as measured using methods described in Example 3 with respect to FIG. 9D;
(x) the GSI does not reduce gamma secretase-mediated cleavage of Notch, or reduces gamma secretase-mediated cleavage of Notch less efficiently, e.g., at least 2-fold, 5-fold, 10-fold, 50-fold, or 100-fold less efficiently, than the GSI reduces gamma secretase-mediated cleavage of BCMA;
(xi) the GSI reduces gamma secretase-mediated cleavage of BCMA more efficiently, e.g., at least 2-fold, 5-fold, 10-fold, 50-fold, or 100-fold more efficiently, than the GSI reduces gamma secretase-mediated cleavage of another substrate of gamma secretase, e.g., Cadherins, ErbB, or CD44;
(xii) the GSI specifically binds to Presenilin-1, e.g., the GSI binds to Presenilin-1 with higher affinity, e.g., at least 2-fold, 5-fold, 10-fold, 50-fold, or 100-fold higher affinity, than the GSI binds to another subunit of gamma secretase, e.g., nicastrin, anterior pharynx-defective 1, or presenilin enhancer 2; or
(xiii) the GSI exhibits low gastrointestinal toxicity.

3. A composition comprising a cell (e.g., a population of cells) that expresses a CAR molecule that binds BCMA (a “BCMA CAR-expressing cell”) for use, in combination with a gamma secretase inhibitor (GSI), in the treatment of a subject having a disease associated with expression of BCMA, wherein:
the CAR molecule comprises an anti-BCMA binding domain comprising:
a heavy chain variable region (VH) comprising a heavy chain complementarity determining region 1 (VHCDR1), a VHCDR2, and a VHCDR3 of any anti-BCMA heavy chain binding domain amino acid sequence listed in Tables 1, 20, 22, 24, and 26 (or a sequence at least about 85%, 90%, 95%, 99% or more identical thereto, and/or having one, two, three or more substitutions, insertions or deletions, e.g., conserved substitutions), and/or
a light chain variable region (VL) comprising a light chain complementarity determining region 1 (VLCDR1), a VLCDR2, and a VLCDR3 of any anti-BCMA light chain binding domain amino acid sequence listed in Tables 1, 21, 23, 25, and 26 (or a sequence at least about 85%, 90%, 95%, 99% or more identical thereto, and/or having one, two, three or more substitutions, insertions or deletions, e.g., conserved substitutions).

4. A method of treating a subject having a disease associated with expression of B-cell maturation antigen (BCMA) comprising administering to the subject an effective amount of a cell (e.g., a population of cells) that expresses a chimeric antigen receptor (CAR) molecule that binds BCMA (a “BCMA CAR-expressing cell”), in combination with a gamma secretase inhibitor (GSI), wherein:
the CAR molecule comprises an anti-BCMA binding domain comprising:
a heavy chain variable region (VH) comprising a heavy chain complementarity determining region 1 (VHCDR1), a VHCDR2, and a VHCDR3 of any anti-BCMA heavy chain binding domain amino acid sequence listed in Tables 1, 20, 22, 24, and 26 (or a sequence at least about 85%, 90%, 95%, 99% or more identical thereto, and/or having one, two, three or more substitutions, insertions or deletions, e.g., conserved substitutions), and/or
a light chain variable region (VL) comprising a light chain complementarity determining region 1 (VLCDR1), a VLCDR2, and a VLCDR3 of any anti-BCMA light chain binding domain amino acid sequence listed in Tables 1, 21, 23, 25, and 26 (or a sequence at least about 85%, 90%, 95%, 99% or more identical thereto, and/or having one, two, three or more substitutions, insertions or deletions, e.g., conserved substitutions).

5. A method of treating a subject having a disease associated with expression of B-cell maturation antigen (BCMA) comprising administering to the subject an effective amount of a cell (e.g., a population of cells) that expresses a chimeric antigen receptor (CAR) molecule that binds BCMA (a “BCMA CAR-expressing cell”), in combination with a gamma secretase inhibitor (GSI), wherein:
(i) the GSI is an antibody molecule that reduces the expression and/or function of gamma secretase, optionally wherein the GSI is an antibody molecule that specifically binds to a subunit of gamma secretase (e.g., presenilin, nicastrin, APH-1, or PEN-2);
(ii) the GSI is (1) a gene editing system targeted to one or more sites within a gene encoding a subunit of gamma secretase (e.g., presenilin, nicastrin, APH-1, or PEN-2) or a regulatory element thereof; (2) a nucleic acid encoding one or more components of the gene editing system; or (3) a combination thereof; or
(iii) the GSI is an agent that mediates RNA interference, e.g., an siRNA or shRNA specific for a gene encoding a subunit of gamma secretase (e.g., presenilin, nicastrin, APH-1, or PEN-2), or a nucleic acid encoding the siRNA or shRNA.

6. The method or use of any of claims 3-5, wherein the GSI has one or more (e.g., 1, 2, 3, 4, 5, 6, 7, 8, 9, 10, 11, 12, or all) of the following properties:
(i) the GSI reduces gamma secretase-mediated cleavage of BCMA;
(ii) the GSI, when incubated with BCMA-expressing cells, increases cell surface expression of BCMA, e.g., by at least 2, 4, 6, 8, 10, 15, or 20-fold, e.g., as measured by a method described herein, e.g., a flow cytometry assay, e.g., as measured using methods described in Example 1 with respect to FIG. 1;
(iii) the GSI, when incubated with BCMA-expressing cells, changes conformation and/or posttranslational modification of the extracellular domain of cell surface-expressed BCMA;
(iv) the GSI, when incubated with BCMA-expressing cells, decreases the level of soluble BCMA in the cell supernatant, e.g., by at least 80, 85, 90, 95, 99, or 99.5%, e.g., as measured by a method described herein, e.g., an ELISA assay, e.g., as measured using methods described in Example 1 with respect to Table 28;
(v) the GSI, when administered in vivo, increases cell surface expression of BCMA, e.g., as measured by a method described herein, e.g., a flow cytometry assay;
(vi) the GSI, when administered in vivo, changes conformation and/or posttranslational modification of the extracellular domain of cell surface-expressed BCMA;
(vii) the GSI, when administered in vivo, decreases the level of soluble BCMA in the serum and/or bone marrow, e.g., as measured by a method described herein, e.g., an ELISA assay;
(viii) the GSI is capable of increasing the activity of the BCMA CAR-expressing cell, e.g., increasing the cytotoxicity of the BCMA CAR-expressing cell, e.g., as measured by a method described herein, e.g., as measured using methods described in Example 3 with respect to FIGS. 7B and 7C;
(ix) the GSI is capable of increasing the activity of the BCMA CAR-expressing cell, e.g., increasing the anti-tumor activity of the BCMA CAR-expressing cell, e.g., as measured by a method described herein, e.g., as measured using methods described in Example 3 with respect to FIG. 9D;
(x) the GSI does not reduce gamma secretase-mediated cleavage of Notch, or reduces gamma secretase-mediated cleavage of Notch less efficiently, e.g., at least 2-fold, 5-fold, 10-fold, 50-fold, or 100-fold less efficiently, than the GSI reduces gamma secretase-mediated cleavage of BCMA;
(xi) the GSI reduces gamma secretase-mediated cleavage of BCMA more efficiently, e.g., at least 2-fold, 5-fold, 10-fold, 50-fold, or 100-fold more efficiently, than the GSI reduces gamma secretase-mediated cleavage of another substrate of gamma secretase, e.g., Cadherins, ErbB, or CD44;
(xii) the GSI specifically binds to Presenilin-1, e.g., the GSI binds to Presenilin-1 with higher affinity, e.g., at least 2-fold, 5-fold, 10-fold, 50-fold, or 100-fold higher affinity, than the GSI binds to another subunit of gamma secretase, e.g., nicastrin, anterior pharynx-defective 1, or presenilin enhancer 2; or
(xiii) the GSI exhibits low gastrointestinal toxicity.

7. The method or use of any of claim 1-4 or 6, wherein the GSI is a small molecule that reduces the expression and/or function of gamma secretase.

8. The method or use of claim 7, wherein the GSI is chosen from LY-450139, PF-5212362, BMS-708163, MK-0752, ELN-318463, BMS-299897, LY-411575, DAPT, BMS-906024, PF-3084014, RO4929097, or LY3039478, optionally wherein the GSI is chosen from PF-5212362, ELN-318463, BMS-906024, or LY3039478.

9. The method or use of claim 7, wherein the GSI is [chemical structure]
or a pharmaceutically acceptable salt thereof.

10. The method or use of claim 7, wherein the GSI is [chemical structure]
or a pharmaceutically acceptable salt thereof.

11. The method or use of claim 7, wherein the GSI is [chemical structure]
or a pharmaceutically acceptable salt thereof.

12. The method or use of claim 7, wherein the GSI is [chemical structure]
or a pharmaceutically acceptable salt thereof.

13. The method or use of claim 7, wherein the GSI is [chemical structure]
or a pharmaceutically acceptable salt thereof.

14. The method or use of claim 7, wherein the GSI is [chemical structure]
or a pharmaceutically acceptable salt thereof.

15. The method or use of claim 7, wherein the GSI is [chemical structure]
or a pharmaceutically acceptable salt thereof.

16. The method or use of claim 7, wherein the GSI is [chemical structure]
or a pharmaceutically acceptable salt thereof.

17. The method or use of claim 7, wherein the GSI is [chemical structure]
or a pharmaceutically acceptable salt thereof.

18. The method or use of claim 7, wherein the GSI is [chemical structure]
or a pharmaceutically acceptable salt thereof.

19. The method or use of claim 7, wherein the GSI is [chemical structure]
or a pharmaceutically acceptable salt thereof.

20. The method or use of claim 7, wherein the GSI is [chemical structure]
or a pharmaceutically acceptable salt thereof.

21. The method or use of any of claims 1-6, wherein the GSI is an antibody molecule that reduces the expression and/or function of gamma secretase, optionally wherein the GSI is an antibody molecule that specifically binds to a subunit of gamma secretase (e.g., presenilin, nicastrin, APH-1, or PEN-2).

22. The method or use of any of claims 1-6, wherein the GSI is (1) a gene editing system targeted to one or more sites within a gene encoding a subunit of gamma secretase (e.g., presenilin, nicastrin, APH-1, or PEN-2) or a regulatory element thereof; (2) a nucleic acid encoding one or more components of the gene editing system; or (3) a combination thereof.

23. The method or use of claim 22, wherein the gene editing system is chosen from a CRISPR/Cas9 system, a zinc finger nuclease system, a TALEN system, or a meganuclease system.

24. The method or use of any of claims 1-6, wherein the GSI is an agent that mediates RNA interference, e.g., an siRNA or shRNA specific for a gene encoding a subunit of gamma secretase (e.g., presenilin, nicastrin, APH-1, or PEN-2), or a nucleic acid encoding the siRNA or shRNA.

25. The method or use of claim 24, wherein the siRNA or shRNA comprises a sequence complementary to a sequence of an mRNA of the gene encoding a subunit of gamma secretase (e.g., presenilin, nicastrin, APH-1, or PEN-2).

26. The method or use of any of claims 1-25, wherein the BCMA CAR-expressing cell comprises a nucleic acid encoding a CAR molecule, wherein the CAR molecule comprises an anti-BCMA binding domain, a transmembrane domain, and an intracellular signaling domain.

27. The method or use of claim 26, wherein the encoded anti-BCMA binding domain comprises a heavy chain variable region (VH) comprising a heavy chain complementarity determining region 1 (VHCDR1), a VHCDR2, and a VHCDR3 of any anti-BCMA heavy chain binding domain amino acid sequence listed in Tables 1, 20, 22, 24, and 26 (or a sequence at least about 85%, 90%, 95%, 99% or more identical thereto, and/or having one, two, three or more substitutions, insertions or deletions, e.g., conserved substitutions).

28. The method or use of claim 26 or 27, wherein the encoded anti-BCMA binding domain comprises a light chain variable region (VL) comprising a light chain complementarity determining region 1 (VLCDR1), a VLCDR2, and a VLCDR3 of any anti-BCMA light chain binding domain amino acid sequence listed in Tables 1, 21, 23, 25, and 26 (or a sequence at least about 85%, 90%, 95%, 99% or more identical thereto, and/or having one, two, three or more substitutions, insertions or deletions, e.g., conserved substitutions).

29. The method or use of any of claims 26-28, wherein the encoded anti-BCMA binding domain comprises:
a heavy chain variable region (VH) comprising a heavy chain complementarity determining region 1 (VHCDR1), a VHCDR2, and a VHCDR3 of any anti-BCMA heavy chain binding domain amino acid sequence listed in Tables 1, 20, 22, 24, and 26 (or a sequence at least about 85%, 90%, 95%, 99% or more identical thereto, and/or having one, two, three or more substitutions, insertions or deletions, e.g., conserved substitutions), and
a light chain variable region (VL) comprising a light chain complementarity determining region 1 (VLCDR1), a VLCDR2, and a VLCDR3 of any anti-BCMA light chain binding domain amino acid sequence listed in Tables 1, 21, 23, 25, and 26 (or a sequence at least about 85%, 90%, 95%, 99% or more identical thereto, and/or having one, two, three or more substitutions, insertions or deletions, e.g., conserved substitutions).

30. The method or use of any of claims 26-29, wherein the encoded anti-BCMA binding domain comprises a VH comprising a VH of any anti-BCMA heavy chain binding domain amino acid sequence listed in Tables 1 and 26 (or a sequence at least about 85%, 90%, 95%, 99% or more identical thereto, and/or having one, two, three or more substitutions, insertions or deletions, e.g., conserved substitutions).

31. The method or use of any of claims 26-30, wherein the encoded anti-BCMA binding domain comprises a VL comprising a VL of any anti-BCMA light chain binding domain amino acid sequence listed in Tables 1 and 26 (or a sequence at least about 85%, 90%, 95%, 99% or more identical thereto, and/or having one, two, three or more substitutions, insertions or deletions, e.g., conserved substitutions).

32. The method or use of any of claims 26-31, wherein the encoded anti-BCMA binding domain comprises:
a VH comprising a VH of any anti-BCMA heavy chain binding domain amino acid sequence listed in Tables 1 and 26 (or a sequence at least about 85%, 90%, 95%, 99% or more identical thereto, and/or having one, two, three or more substitutions, insertions or deletions, e.g., conserved substitutions), and
a VL comprising a VL of any anti-BCMA light chain binding domain amino acid sequence listed in Tables 1 and 26 (or a sequence at least about 85%, 90%, 95%, 99% or more identical thereto, and/or having one, two, three or more substitutions, insertions or deletions, e.g., conserved substitutions).

33. The method or use of any of claims 26-32, wherein:
(i) the encoded anti-BCMA binding domain comprises an scFv comprising an scFv amino acid sequence listed in Table 1 (or a sequence at least about 85%, 90%, 95%, 99% or more identical thereto, and/or having one, two, three or more substitutions, insertions or deletions, e.g., conserved substitutions);
(ii) the encoded anti-BCMA binding domain comprises an amino acid sequence selected from the group consisting of SEQ ID NO: 39, SEQ ID NO: 40, SEQ ID NO: 41, SEQ ID NO: 42, SEQ ID NO: 43, SEQ ID NO: 44, SEQ ID NO: 45, SEQ ID NO: 46, SEQ ID NO: 47, SEQ ID NO: 48, SEQ ID NO: 49, SEQ ID NO: 50, SEQ ID NO: 51, SEQ ID NO: 52, SEQ ID NO: 53, SEQ ID NO: 129, SEQ ID NO: 130, SEQ ID NO: 131, SEQ ID NO: 132, SEQ ID NO: 133, SEQ ID NO: 134, SEQ ID NO: 135, SEQ ID NO: 136, SEQ ID NO: 137, SEQ ID NO: 138, SEQ ID NO: 139, SEQ ID NO: 140, SEQ ID NO: 141, SEQ ID NO: 142, SEQ ID NO: 143, SEQ ID NO: 144, SEQ ID NO: 145, SEQ ID NO: 146, SEQ ID NO: 147, SEQ ID NO: 148, and SEQ ID NO: 149, or a sequence with 95-99% identify thereof; or
(iii) the nucleic acid encoding the CAR molecule comprises a nucleotide sequence selected from the group consisting of SEQ ID NO: 54, SEQ ID NO: 55, SEQ ID NO: 56, SEQ ID NO: 57, SEQ ID NO: 58, SEQ ID NO: 59, SEQ ID NO: 60, SEQ ID NO: 61, SEQ ID NO: 62, SEQ ID NO: 63, SEQ ID NO: 64, SEQ ID NO: 65, SEQ ID NO: 66, SEQ ID NO: 67, SEQ ID NO: 68, SEQ ID NO: 150, SEQ ID NO: 151, SEQ ID NO: 152, SEQ ID NO: 153, SEQ ID NO: 154, SEQ ID NO: 155, SEQ ID NO: 156, SEQ ID NO: 157, SEQ ID NO: 158, SEQ ID NO: 159, SEQ ID NO: 160, SEQ ID NO: 161, SEQ ID NO: 162, SEQ ID NO: 163, SEQ ID NO: 164, SEQ ID NO: 165, SEQ ID NO: 166, SEQ ID NO: 167, SEQ ID NO: 168, SEQ ID NO: 169, SEQ ID NO: 170, or a sequence with 95-99% identify thereof.

34. The method or use of any of claims 26-33, wherein:
(i) the encoded CAR molecule comprises a full CAR amino acid sequence listed in Table 1 (or a sequence at least about 85%, 90%, 95%, 99% or more identical thereto, and/or having one, two, three or more substitutions, insertions or deletions, e.g., conserved substitutions);
(ii) the encoded CAR molecule comprises an amino acid sequence selected from the group consisting of residues 22-483 of SEQ ID NO: 109, residues 22-490 of SEQ ID NO: 99, residues 22-488 of SEQ ID NO: 100, residues 22-487 of SEQ ID NO: 101, residues 22-493 of SEQ ID NO: 102, residues 22-490 of SEQ ID NO: 103, residues 22-491 of SEQ ID NO: 104, residues 22-482 of SEQ ID NO: 105, residues 22-483 of SEQ ID NO: 106, residues 22-485 of SEQ ID NO: 107, residues 22-483 of SEQ ID NO: 108, residues 22-490 of SEQ ID NO: 110, residues 22-483 of SEQ ID NO: 111, residues 22-484 of SEQ ID NO: 112, residues 22-485 of SEQ ID NO: 113, residues 22-487 of SEQ ID NO: 213, residues 23-489 of SEQ ID NO: 214, residues 22-490 of SEQ ID NO: 215, residues 22-484 of SEQ ID NO: 216, residues 22-485 of SEQ ID NO: 217, residues 22-489 of SEQ ID NO: 218, residues 22-497 of SEQ ID NO: 219, residues 22-492 of SEQ ID NO: 220, residues 22-490 of SEQ ID NO: 221, residues 22-485 of SEQ ID NO: 222, residues 22-492 of SEQ ID NO: 223, residues 22-492 of SEQ ID NO: 224, residues 22-483 of SEQ ID NO: 225, residues 22-490 of SEQ ID NO: 226, residues 22-485 of SEQ ID NO: 227, residues 22-486 of SEQ ID NO: 228, residues 22-492 of SEQ ID NO: 229, residues 22-488 of SEQ ID NO: 230, residues 22-488 of SEQ ID NO: 231, residues 22-495 of SEQ ID NO: 232, residues 22-490 of SEQ ID NO: 233, or a sequence with 95-99% identify thereof; or
(iii) the nucleic acid encoding the CAR molecule comprises a nucleotide sequence selected from the group consisting of SEQ ID NO: 114, SEQ ID NO: 115, SEQ ID NO: 116, SEQ ID NO: 117, SEQ ID NO: 118, SEQ ID NO: 119, SEQ ID NO: 120, SEQ ID NO: 121, SEQ ID NO: 122, SEQ ID NO: 123, SEQ ID NO: 124, SEQ ID NO: 125, SEQ ID NO: 126, SEQ ID NO: 127, SEQ ID NO: 128, SEQ ID NO: 234, SEQ ID NO: 235, SEQ ID NO: 236, SEQ ID NO: 237, SEQ ID NO: 238, SEQ ID NO: 239, SEQ ID NO: 240, SEQ ID NO: 241, SEQ ID NO: 242, SEQ ID NO: 243, SEQ ID NO: 244, SEQ ID NO: 245, SEQ ID NO: 246, SEQ ID NO: 247, SEQ ID NO: 248, SEQ ID NO: 249, SEQ ID NO: 250, SEQ ID NO: 251, SEQ ID NO: 252, SEQ ID NO: 253, and SEQ ID NO: 254, or a sequence with 95-99% identify thereof.

35. The method or use of any of claims 26-34, wherein:
(i) the encoded transmembrane domain comprises a transmembrane domain of a protein selected from the group consisting of the alpha, beta or zeta chain of a T-cell receptor, CD28, CD3 epsilon, CD45, CD4, CD5, CD8, CD9, CD16, CD22, CD33, CD37, CD64, CD80, CD86, CD134, CD137 and CD154;
(ii) the encoded transmembrane domain comprises the amino acid sequence of SEQ ID NO: 6 (or a sequence at least about 85%, 90%, 95%, 99% or more identical thereto, and/or having one, two, three or more substitutions, insertions or deletions, e.g., conserved substitutions); or
(iii) the nucleic acid encoding the CAR molecule comprises the nucleotide sequence of SEQ ID NO: 17, or a sequence with 95-99% identify thereof.

36. The method or use of any of claims 26-35, wherein the encoded anti-BCMA binding domain is connected to the transmembrane domain by a hinge region.

37. The method or use of claim 36, wherein:
(i) the encoded hinge region comprises the amino acid sequence of SEQ ID NO: 2 or 36 (or a sequence at least about 85%, 90%, 95%, 99% or more identical thereto, and/or having one, two, three or more substitutions, insertions or deletions, e.g., conserved substitutions); or
(ii) the nucleic acid encoding the CAR molecule comprises the nucleotide sequence of SEQ ID NO: 13 or 37, or a sequence with 95-99% identify thereof.

38. The method or use of any of claims 26-37, wherein the encoded intracellular signaling domain is a functional signaling domain obtained from a protein chosen from an MHC class I molecule, a TNF receptor, an immunoglobulin-like protein, a cytokine receptor, integrin, signaling lymphocytic activation molecule (SLAM), an activating NK cell receptor, BTLA, a Toll ligand receptor, CD3, OX40, CD2, CD7, CD27, CD28, CD30, CD40, CDS, ICAM-1, 4-1BB (CD137), B7-H3, ICOS (CD278), GITR, BAFFR, LIGHT, HVEM (LIGHTR), KIRDS2, SLAMF7, NKp80 (KLRF1), NKp44, NKp30, NKp46, CD19, CD4, CD8alpha, CD8beta, IL2R beta, IL2R gamma, IL7R alpha, ITGA4, VLA1, CD49a, ITGA4, IA4, CD49D, ITGA6, VLA-6, CD49f, ITGAD, CD11d, ITGAE, CD103, ITGAL, CD11a, LFA-1, ITGAM, CD11 b, ITGAX, CD11c, ITGB1, CD29, ITGB2, CD18, ITGB7, NKG2D, NKG2C, TNFR2, TRANCE/RANKL, DNAM1 (CD226), SLAMF4 (CD244, 2B4), CD84, CD96 (Tactile), CEACAM1, CRTAM, Ly9 (CD229), CD160 (BY55), PSGL1, CD100 (SEMA4D), CD69, SLAMF6 (NTB-A, Ly108), SLAM (SLAMF1, CD150, IPO-3), BLAME (SLAMF8), SELPLG (CD162), LTBR, LAT, GADS, SLP-76, PAG/Cbp, CD19a, or a ligand that specifically binds with CD83.

39. The method or use of claim 38, wherein the encoded intracellular signaling domain is a functional signaling domain of a protein chosen from 4-1BB, CD3 zeta, CD28, or ICOS.

40. The method or use of any of claims 26-39, wherein:
(i) the encoded intracellular signaling domain comprises the amino acid sequence of SEQ ID NO: 7, 9, 10, 1104, or 1106 (or a sequence at least about 85%, 90%, 95%, 99% or more identical thereto, and/or having one, two, three or more substitutions, insertions or deletions, e.g., conserved substitutions); or
(ii) the nucleic acid molecule encoding the CAR molecule comprises the nucleotide sequence of SEQ ID NO: 18, 20, 21, 1105, or 1107, or a sequence with 95-99% identify thereof.

41. The method or use of any of claims 26-40, wherein the encoded intracellular signaling domain comprises the amino acid sequence of SEQ ID NO: 7 and the amino acid sequence of SEQ ID NO: 9 or 10, or an amino acid sequence at least about 85%, 90%, 95%, 99% or more identical to SEQ ID NO: 7 and an amino acid sequence at least about 85%, 90%, 95%, 99% or more identical to SEQ ID NO: 9 or 10.

42. The method or use of any of claims 26-41, wherein the nucleic acid encoding the CAR molecule comprises:
(i) a leader sequence encoding the amino acid sequence of SEQ ID NO: 1 (or a sequence at least about 85%, 90%, 95%, 99% or more identical thereto, and/or having one, two, three or more substitutions, insertions or deletions, e.g., conserved substitutions); or
(ii) the nucleotide sequence of SEQ ID NO: 12, or a sequence with 95-99% identify thereof.

43. The method or use of any of claims 26-42, wherein the nucleic acid encoding the CAR molecule is a DNA molecule, optionally wherein the DNA molecule is transcribed under an EF-1 promoter comprising the sequence of SEQ ID NO: 11.

44. The method or use of any of claims 26-42, wherein the nucleic acid encoding the CAR molecule is an RNA molecule.

45. The method or use of any of claims 1-44, wherein the cell is an autologous cell or an allogeneic cell.

46. The method or use of any of claims 1-45, wherein the cell is a T cell or a natural killer (NK) cell.

47. The method or use of any of claims 1-46, wherein the disease associated with expression of BCMA is:
(i) a cancer or malignancy, or a precancerous condition chosen from one or more of a myelodysplasia, a myelodysplastic syndrome or a preleukemia, or
(ii) a non-cancer related indication associated with expression of BCMA.

48. The method or use of any of claims 1-47, wherein the disease is chosen from acute leukemia, B-cell acute lymphoid leukemia (BALL), T-cell acute lymphoid leukemia (TALL), acute lymphoid leukemia (ALL), chronic myelogenous leukemia (CML), chronic lymphocytic leukemia (CLL), B cell prolymphocytic leukemia, blastic plasmacytoid dendritic cell neoplasm, Burkitt's lymphoma, diffuse large B cell lymphoma, follicular lymphoma, hairy cell leukemia, small cell- or large cell-follicular lymphoma, a malignant lymphoproliferative condition, mucosa associated lymphoid tissue (MALT) lymphoma, mantle cell lymphoma, marginal zone lymphoma, multiple myeloma, myelodysplasia and myelodysplastic syndrome, non-Hodgkin's lymphoma, plasmablastic lymphoma, plasmacytoid dendritic cell neoplasm, Waldenstrom macroglobulinemia, a plasma cell proliferative disorder (e.g., asymptomatic myeloma (smoldering multiple myeloma or indolent myeloma), monoclonal gammapathy of undetermined significance (MGUS), Waldenstrom's macroglobulinemia, plasmacytomas (e.g., plasma cell dyscrasia, solitary myeloma, solitary plasmacytoma, extramedullary plasmacytoma, and multiple plasmacytoma), systemic amyloid light chain amyloidosis, and POEMS syndrome (also known as Crow-Fukase syndrome, Takatsuki disease, and PEP syndrome)), prostate cancer (e.g., castrate-resistant or therapy-resistant prostate cancer, or metastatic prostate cancer), pancreatic cancer, or lung cancer.

49. The method or use of any of claims 1-48, wherein the disease is a hematologic cancer.

50. The method or use of any of claims 1-49, wherein the disease is multiple myeloma.

51. The method or use of any of claims 1-50, wherein the BCMA CAR-expressing cell and the GSI are administered simultaneously or sequentially.

52. The method or use of claim 51, wherein the GSI is administered prior to the administration of the BCMA CAR-expressing cell (e.g., GSI is administered 1, 2, 3, 4, or 5 days prior to the administration of the BCMA CAR-expressing cell), optionally wherein after the administration of the GSI and prior to the administration of the BCMA CAR-expressing cell, the subject shows an increase in cell surface BCMA expression levels and/or a decrease in soluble BCMA levels.

53. The method or use of any of claims 1-50, comprising a first treatment regimen and a second treatment regimen, wherein the first treatment regimen is performed prior to the second treatment regimen, wherein:
(i) the first treatment regimen comprises administering a first dose of the BCMA CAR-expressing cell, and
(ii) the second treatment regimen comprises administering a dose of GSI followed by a second dose of the BCMA CAR-expressing cell,
optionally wherein after the administration of the dose of GSI and prior to the administration of the second dose of the BCMA CAR-expressing cell, the subject shows an increase in cell surface BCMA expression levels and/or a decrease in soluble BCMA levels.

54. The method or use of any of claims 1-53, wherein the BCMA CAR-expressing cell and the GSI are administered in combination with a third therapeutic agent or procedure, wherein the third therapeutic agent or procedure is chosen from one or more of chemotherapy, a targeted anti-cancer therapy, an oncolytic drug, a cytotoxic agent, an immune-based therapy, a cytokine, surgical procedure, a radiation procedure, an activator of a costimulatory molecule, an inhibitor of an inhibitory molecule, a vaccine, or a cellular immunotherapy.

55. The method or use of claim 54, wherein the third therapeutic agent or procedure is chosen from:
(i) Dexamethasone;
(ii) a PD-1 inhibitor, optionally wherein the PD-1 inhibitor is selected from the group consisting of PDR001, Nivolumab, Pembrolizumab, Pidilizumab, MEDI0680, REGN2810, TSR-042, PF-06801591, and AMP-224;
(iii) a PD-L1 inhibitor, optionally wherein the PD-L1 inhibitor is selected from the group consisting of FAZ053, Atezolizumab, Avelumab, Durvalumab, and BMS-936559;
(iv) a CTLA-4 inhibitor, optionally wherein the CTLA-4 inhibitor is Ipilimumab or Tremelimumab;
(v) a TIM-3 inhibitor, optionally wherein the TIM-3 inhibitor is MGB453 or TSR-022;
(vi) a LAG-3 inhibitor, optionally wherein the LAG-3 inhibitor is selected from the group consisting of LAG525, BMS-986016, and TSR-033;
(vii) an mTOR inhibitor, optionally wherein the mTOR inhibitor is RAD001 or rapamycin; or
(viii) an agent chosen from HetIL-15, an anti-TGFβ antibody, an anti-CD47 antibody, an IDO inhibitor, a STING agonist, a TLR agonist, an immunomodulatory drug (IMiD) (e.g., Thalidomide, Lenalidomide, or Pomalidomide), a proteasome inhibitor (e.g., Bortezomib), or an ADCC-competent antibody (e.g., Daratumumab or Elotuzumab).

56. A composition comprising a cell (e.g., a population of cells) that expresses a CAR molecule that binds BCMA (a “BCMA CAR-expressing cell”) and a GSI, optionally wherein:
the CAR molecule comprises an anti-BCMA binding domain, a transmembrane domain, and an intracellular signaling domain, and optionally wherein:
the GSI has one or more (e.g., 1, 2, 3, 4, 5, 6, 7, 8, 9, 10, 11, 12, or all) of the following properties:
(i) the GSI reduces gamma secretase-mediated cleavage of BCMA;
(ii) the GSI, when incubated with BCMA-expressing cells, increases cell surface expression of BCMA, e.g., by at least 2, 4, 6, 8, 10, 15, or 20-fold, e.g., as measured by a method described herein, e.g., a flow cytometry assay, e.g., as measured using methods described in Example 1 with respect to FIG. 1;
(iii) the GSI, when incubated with BCMA-expressing cells, changes conformation and/or posttranslational modification of the extracellular domain of cell surface-expressed BCMA;
(iv) the GSI, when incubated with BCMA-expressing cells, decreases the level of soluble BCMA in the cell supernatant, e.g., by at least 80, 85, 90, 95, 99, or 99.5%, e.g., as measured by a method described herein, e.g., an ELISA assay, e.g., as measured using methods described in Example 1 with respect to Table 28;
(v) the GSI, when administered in vivo, increases cell surface expression of BCMA, e.g., as measured by a method described herein, e.g., a flow cytometry assay;
(vi) the GSI, when administered in vivo, changes conformation and/or posttranslational modification of the extracellular domain of cell surface-expressed BCMA;
(vii) the GSI, when administered in vivo, decreases the level of soluble BCMA in the serum and/or bone marrow, e.g., as measured by a method described herein, e.g., an ELISA assay;
(viii) the GSI is capable of increasing the activity of the BCMA CAR-expressing cell, e.g., increasing the cytotoxicity of the BCMA CAR-expressing cell, e.g., as measured by a method described herein, e.g., as measured using methods described in Example 3 with respect to FIGS. 7B and 7C;
(ix) the GSI is capable of increasing the activity of the BCMA CAR-expressing cell, e.g., increasing the anti-tumor activity of the BCMA CAR-expressing cell, e.g., as measured by a method described herein, e.g., as measured using methods described in Example 3 with respect to FIG. 9D;
(x) the GSI does not reduce gamma secretase-mediated cleavage of Notch, or reduces gamma secretase-mediated cleavage of Notch less efficiently, e.g., at least 2-fold, 5-fold, 10-fold, 50-fold, or 100-fold less efficiently, than the GSI reduces gamma secretase-mediated cleavage of BCMA;
(xi) the GSI reduces gamma secretase-mediated cleavage of BCMA more efficiently, e.g., at least 2-fold, 5-fold, 10-fold, 50-fold, or 100-fold more efficiently, than the GSI reduces gamma secretase-mediated cleavage of another substrate of gamma secretase, e.g., Cadherins, ErbB, or CD44;
(xii) the GSI specifically binds to Presenilin-1, e.g., the GSI binds to Presenilin-1 with higher affinity, e.g., at least 2-fold, 5-fold, 10-fold, 50-fold, or 100-fold higher affinity, than the GSI binds to another subunit of gamma secretase, e.g., nicastrin, anterior pharynx-defective 1, or presenilin enhancer 2; or
(xiii) the GSI exhibits low gastrointestinal toxicity.

57. The composition of claim 56, wherein the BCMA CAR-expressing cell and the GSI are present in a single dose form, or as two or more dose forms.

58. The composition of claim 56 or 57 for use as a medicament.

59. The composition of claim 56 or 57 for use in the treatment of a disease associated with expression of BCMA.

60. A kit comprising a cell (e.g., a population of cells) that expresses a CAR molecule that binds BCMA (a “BCMA CAR-expressing cell”) and a GSI, optionally wherein:
the CAR molecule comprises an anti-BCMA binding domain, a transmembrane domain, and an intracellular signaling domain, and optionally wherein:
the GSI has one or more (e.g., 1, 2, 3, 4, 5, 6, 7, 8, 9, 10, 11, 12, or all) of the following properties:
(i) the GSI reduces gamma secretase-mediated cleavage of BCMA;
(ii) the GSI, when incubated with BCMA-expressing cells, increases cell surface expression of BCMA, e.g., by at least 2, 4, 6, 8, 10, 15, or 20-fold, e.g., as measured by a method described herein, e.g., a flow cytometry assay, e.g., as measured using methods described in Example 1 with respect to FIG. 1;
(iii) the GSI, when incubated with BCMA-expressing cells, changes conformation and/or posttranslational modification of the extracellular domain of cell surface-expressed BCMA;
(iv) the GSI, when incubated with BCMA-expressing cells, decreases the level of soluble BCMA in the cell supernatant, e.g., by at least 80, 85, 90, 95, 99, or 99.5%, e.g., as measured by a method described herein, e.g., an ELISA assay, e.g., as measured using methods described in Example 1 with respect to Table 28;
(v) the GSI, when administered in vivo, increases cell surface expression of BCMA, e.g., as measured by a method described herein, e.g., a flow cytometry assay;
(vi) the GSI, when administered in vivo, changes conformation and/or posttranslational modification of the extracellular domain of cell surface-expressed BCMA;
(vii) the GSI, when administered in vivo, decreases the level of soluble BCMA in the serum and/or bone marrow, e.g., as measured by a method described herein, e.g., an ELISA assay;
(viii) the GSI is capable of increasing the activity of the BCMA CAR-expressing cell, e.g., increasing the cytotoxicity of the BCMA CAR-expressing cell, e.g., as measured by a method described herein, e.g., as measured using methods described in Example 3 with respect to FIGS. 7B and 7C;
(ix) the GSI is capable of increasing the activity of the BCMA CAR-expressing cell, e.g., increasing the anti-tumor activity of the BCMA CAR-expressing cell, e.g., as measured by a method described herein, e.g., as measured using methods described in Example 3 with respect to FIG. 9D;
(x) the GSI does not reduce gamma secretase-mediated cleavage of Notch, or reduces gamma secretase-mediated cleavage of Notch less efficiently, e.g., at least 2-fold, 5-fold, 10-fold, 50-fold, or 100-fold less efficiently, than the GSI reduces gamma secretase-mediated cleavage of BCMA;
(xi) the GSI reduces gamma secretase-mediated cleavage of BCMA more efficiently, e.g., at least 2-fold, 5-fold, 10-fold, 50-fold, or 100-fold more efficiently, than the GSI reduces gamma secretase-mediated cleavage of another substrate of gamma secretase, e.g., Cadherins, ErbB, or CD44;
(xii) the GSI specifically binds to Presenilin-1, e.g., the GSI binds to Presenilin-1 with higher affinity, e.g., at least 2-fold, 5-fold, 10-fold, 50-fold, or 100-fold higher affinity, than the GSI binds to another subunit of gamma secretase, e.g., nicastrin, anterior pharynx-defective 1, or presenilin enhancer 2; or
(xiii) the GSI exhibits low gastrointestinal toxicity.
